(19) United States
(12) Patent Application Publication
(10) Pub. No.: US 2002/0039764 A1
(43) Pub. Date: Apr. 4, 2002

(54) Nucleic, acids, proteins, and antibodies

(76) Inventors: Craig A. Rosen, Laytonsville, MD (US); Steven M. Ruben, Olney, MD (US)

Correspondence Address: HUMAN GENOME SCIENCES INC, 9410 KEY WEST AVENUE, ROCKVILLE, MD, 20850

(21) Appl. No.: 09/925,298

(22) Filed: Aug. 10, 2001

Related U.S. Application Data
(63) Continuation-in-part of application No. PCT/US00/05881, filed on Mar. 8, 2000.
(60) Provisional application No. 60/124,270, filed on Mar. 12, 1999.

(51) Int. Cl. C12P 21/02; C12N 5/06; C07H 21/04

(52) U.S. Cl. 435/69.1; 435/325; 435/320.1; 536/23.1

(57) ABSTRACT

The present invention relates to novel ovarian cancer and/or breast cancer related polynucleotides, the polypeptides encoded by these polynucleotides herein collectively referred to as “ovarian and/or breast antigens,” and antibodies that immunospecifically bind these polypeptides, and the use of such ovarian and/or breast polynucleotides, antigens, and antibodies for detecting, treating, preventing and/or prognosing disorders of the reproductive system, particularly disorders of the ovaries and/or breast, including, but not limited to, the presence of ovarian and/or breast cancer and ovarian and/or breast cancer metastases. More specifically, isolated ovarian and/or breast nucleic acid molecules are provided encoding novel ovarian and/or breast polypeptides. Novel ovarian and/or breast polypeptides and antibodies that bind to these polypeptides are provided. Also provided are vectors, host cells, and recombinant and synthetic methods for producing human ovarian and/or breast polynucleotides, polypeptides, and/or antibodies. The invention further relates to diagnostic and therapeutic methods useful for diagnosing, treating, preventing and/or prognosing disorders related to the ovaries and/or breast, including ovarian and/or breast cancer, and therapeutic methods for treating such disorders. The invention further relates to screening methods for identifying agonists and antagonists of polynucleotides and polypeptides of the invention. The invention further relates to methods and/or compositions for inhibiting or promoting the production and/or function of the polypeptides of the invention.

[0001] This application is a claims benefit of priority under 35 U.S.C. § 365(c) and § 120 to International Application Number PCT/US00/05881, filed Mar. 8, 2000 which was published by the International Bureau in the English language as International Publication Number WO00/55173 on Sep. 21, 2000 and under 35 U.S.C. § 119(e) to U.S. application No. 60/124,270 filed March 12, 1999, both of which are hereby incorporated by reference herein.

[0002] Statement under 37 C.F.R. § 1.77(b)(4)

[0003] This application refers to a “Sequence Listing” listed below, which is provided as an electronic document on two identical compact discs (CD-R), labeled “Copy 1” and “Copy 2.” These compact discs each contain the following files, which are hereby incorporated in their entirety herein:

| Document | File Name | Size in bytes | Date of Creation |
|---|---|---|---|
| Sequence Listing | PA103SEQLIST.txt | 1,409,089 | 08/08/2001 |

### FIELD OF THE INVENTION

[0004] The present invention relates to novel ovarian cancer and/or breast cancer related polynucleotides, the polypeptides encoded by these polynucleotides herein collectively referred to as “ovarian and/or breast antigens,” and antibodies that immunospecifically bind these polypeptides, and the use of such ovarian and/or breast polynucleotides, antigens, and antibodies for detecting, treating, preventing and/or prognosing disorders of the reproductive system, particularly disorders of the ovaries and/or breast, including, but not limited to, the presence of ovarian and/or breast cancer and ovarian and/or breast cancer metastases. More specifically, isolated ovarian and/or breast nucleic acid molecules are provided encoding novel ovarian and/or breast polypeptides. Novel ovarian and/or breast polypeptides and antibodies that bind to these polypeptides are provided. Also provided are vectors, host cells, and recombinant and synthetic methods for producing human ovarian and/or breast polynucleotides, polypeptides, and/or antibodies. The invention further relates to diagnostic and therapeutic methods useful for diagnosing, treating, preventing and/or prognosing disorders related to the ovaries and/or breast, including ovarian and/or breast cancer, and therapeutic methods for treating such disorders. The invention further relates to screening methods for identifying agonists and antagonists of polynucleotides and polypeptides of the invention. The invention further relates to methods and/or compositions for inhibiting or promoting the production and/or function of the polypeptides of the invention.

### BACKGROUND OF THE INVENTION

[0005] The female reproductive system is comprised of both external and internal organs. The external organs function in permitting sperm to enter the body and protecting the internal genital organs from infection and injury. The internal organs form a pathway (the genital tract) for reproduction, beginning at the ovaries, through the fallopian tubes (oviducts) and uterus, to the birth canal (vagina).

[0006] The sexual and reproductive functions in the female can be divided into two major phases: first, preparation of the body for conception, and second, the gestation and parturition. Gestation and parturition only occur if an ovum becomes fertilized. If fertilization does not occur, the reproductive system undergoes a cycle to ensure frequent readiness for conception and fertilization.

[0007] The complexity of the female reproductive system renders it susceptible to several diseases and disorders. In particular, the ovaries and breast are subject to diseases and/or disorders such as infections, hyperproliferative disorders, as well as regulatory and genetic abnormalities.

[0008] Disorders of the Ovary

[0009] A woman's ovaries are located on both sides of the uterus, below the opening of the fallopian tubes (tubes that extend from the uterus to the ovaries). In addition to producing egg cells for reproduction, the ovaries produce estrogen and progesterone, which affect many of the female characteristics and reproductive functions.

[0010] Anovulation (the absence of egg release by the ovaries) is a serious condition leading to infertility. The exact etiology of anovulation, especially in women with otherwise normal menstrual cycles, is unclear, however several potential causes are under study, including: impaired follicular development (probably due to low or absent estrogen production or binding), normal follicular development with lack of egg release (probably due to progesterone deficiency), or insufficient production of gonadotropin-releasing hormone from the hypothalamus. Current treatments include clomiphene injections or hormonal therapy, although both can lead to serious side effects such as ovarian cancer and ovarian hyperstimulation syndrome.

[0011] Anovulation is also associated with polycyctic ovary syndrome (also known as Stein-Leventhal syndrome). This syndrome is and endocrine disorder characterized by an elevated level of male hormones (androgens). Other than anovulation, symptoms include growth of male-patterned body hair (hirsutism), excessive acne, irregular or absent menses, excessive bleeding, and obesity. Usually, the ovaries appear enlarged and may contain many follicular cysts.

[0012] Ovarian cancer develops most often in women between the ages of 50 and 70. It is the third most common cancer of the female reproductive system, but more women die of ovarian cancers than of any other. Ovaries include a variety of cell types, each of which may give rise to a distinct type of cancer, including, but not limited to, ovarian epithelial cancer, ovarian germ cell tumors, ovarian papillary serous adenocarcinoma, ovarian mucinous adenocarcinoma, ovarian Krukenberg tumor, malignant mixed Mullerian tumors, and ovarian low malignant tumors.

[0013] Other disorders of the ovaries also include, but are not limited to, inflammatory disorders, such as oophoritis (e.g., caused by viral or bacterial infection), ovarian cysts, and autoimmune disorders (e.g., premature ovarian failure and autoimmune oophoritis).

[0014] Disorders of the Breast

[0015] The breast is comprised of different structures, each with its own specific function. One-third of the breast is comprised of fatty tissue. The other two-thirds is made up of structural components called ducts and lobules. Milk is produced in the lobules and funneled through the ducts to the nipple. Disorders of the breast typically involve the formation of lesions within breast tissue. While many of these lesions are benign in nature, they may lead to cancer if left untreated.

[0016] Benign breast lesions include, for example, cysts, which are non-cancerous, fluid-filled sacs that forma mass within breast tissue. The cause of breast cysts is unknown, though injury may be involved, and their main symptom is pain. While considered harmless, a professional should drain cysts and the fluid examined because cancer of the cyst wall, although quite rare, is possible.

[0017] Other benign breast lesions include fibrous breast lumps (fibroadenomas), breast infection (mastitis), intraductal papilloma, and abscesses. Fibrous breast lumps are small, solid lumps of glandular tissue. These lumps usually appear in young women, often in teenagers, and are easy to remove. Intraductal papilloma are small lumps located within a milk duct, often causing inappropriate discharge from the nipple. Breast abscesses are collections of pus in breast tissue that develop from breast infections that go untreated.

[0018] Breast cancer is the most common cancer among women, other than skin cancer and is the second leading cause of cancer death in women, after lung cancer. The American Cancer Society predicts that there will be about 182,800 new cases of invasive breast cancer in the year 2000 among women in this country and about 40,800 deaths from the disease. Breast cancer also occurs among men, although much less often. It is generally believed that this malignancy arises from a multi step process involving mutations in a relatively small number of genes, perhaps 10 or less. These mutations result in significant changes in the growth and differentiation of breast tissue that allow it to grow independent of normal cellular controls, to metastasize, and to escape immune surveillance. The genetic heterogeneity of most breast cancers suggests that they arise by a variety of initiating events and that the characteristics of individual cancers are due to the collective pattern of genetic changes that accumulate.

[0019] The discovery of new human ovarian and/or breast associated polynucleotides, the polypeptides encoded by them, and antibodies that immunospecifically bind these polypeptides, satisfies a need in the art by providing new compositions which are useful in the diagnosis, treatment, prevention and/or prognosis of disorders of the ovaries and/or breast, including, but not limited to, neoplastic disorders (e.g., ovarian Krukenberg tumor, malignant mixed Mullerian tumors, and/or as described under “Hyperproliferative Disorders” below), infectious diseases (e.g., mastitis, oophoritis, and/or as described under “Infectious Diseases” below), and inflammatory diseases (e.g., abcesses and/or as described under “Immune Disorders” below) and as described in “Reproductive System Disorders” below.

### SUMMARY OF THE INVENTION

[0020] The present invention includes isolated nucleic acid molecules comprising, or alternatively, consisting of, a breast, ovarian, breast cancer and/or ovarian cancer associated polynucleotide sequence disclosed in the sequence listing (as SEQ ID Nos: 1 to 418) and/or contained in a human cDNA clone described in Tables 1, 2 and 5 and deposited with the American Type Culture Collection (“ATCC”). Fragments, variant, and derivatives of these nucleic acid molecules are also encompassed by the invention. The present invention also includes isolated nucleic acid molecules comprising, or alternatively consisting of, a polynucleotide encoding a breast, ovarian, breast cancer, and/or ovarian cancer associated polypeptide. The present invention further includes breast, ovarian, breast cancer, and/or ovarian cancer polypeptides encoded by these polynucleotides. Further provided for are amino acid sequences comprising, or alternatively consisting of, breast, ovarian, breast cancer, and/or ovarian cancer polypeptides as disclosed in the sequence listing (as SEQ ID Nos: 419 to 836) and/or encoded by a human cDNA clone described in Tables 1, 2 and 5 and deposited with the ATCC. Antibodies that bind these polypeptides are also encompassed by the invention. Polypeptide fragments, variants, and derivatives of these amino acid sequences are also encompassed by the invention, as are polynucleotides encoding these polypeptides and antibodies that bind these polypeptides. Also provided are diagnostic methods for diagnosing and treating, preventing, and/or prognosing disorders related to the female reproductive system, specifically disorders related to the breast and/or ovary, including breast cancer and/or ovarian cancer, and therapeutic methods for treating such disorders. The invention further relates to screening methods for identifying agonists and antagonists of ovarian and/or breast antigens of the invention.

### DETAILED DESCRIPTION

[0021] Tables

[0022] Table 1 summarizes some of the ovarian and/or breast antigens encompassed by the invention (including contig sequences (SEQ ID NO:X) and the cDNA clone related to the contig sequence) and further summarizes certain characteristics of the breast, ovarian, breast cancer and/or ovarian cancer associated polynucleotides and the polypeptides encoded thereby. The first column shows the “SEQ ID NO:” for each of the 418 ovarian and/or breast antigen polynucleotide sequences of the invention. The second column provides a unique “Sequence/Contig ID” identification for each breast, ovarian, breast cancer and/or ovarian cancer associated sequence. The third column, “Gene Name,” and the fourth column, “Overlap,” provide a putative identification of the gene based on the sequence similarity of its translation product to an amino acid sequence found in a publicly accessible gene database and the database accession no. for the database sequence having similarity, respectively. The fifth and sixth columns provide the location (nucleotide position nos. within the contig), “Start” and “End”, in the polynucleotide sequence “SEQ ID NO:X” that delineate the preferred ORF shown in the sequence listing as SEQ ID NO:Y. The seventh and eighth columns provide the “% Id” (percent identity) and “% Si” (percent similarity), respectively, observed between the aligned sequence segments of the translation product of SEQ ID NO:X and the database sequence. The ninth column provides a unique “Clone ID” for a cDNA clone related to each contig sequence.

[0023] Table 2 summarizes ATCC Deposits, Deposit dates, and ATCC designation numbers of deposits made with the ATCC in connection with the present application.

[0024] Table 3 indicates public ESTs, of which at least one, two, three, four, five, ten, fifteen or more of any one or more of these public EST sequences are optionally excluded from certain embodiments of the invention.

[0025] Table 4 lists residues comprising antigenic epitopes of antigenic epitope-bearing fragments present in most of the breast, ovarian, breast cancer or ovarian cancer associated polynucleotides described in Table 1 as predicted by the inventors using the algorithm of Jameson and Wolf, (1988) Comp. Appl. Biosci. 4:181-186. The Jameson-Wolf antigenic analysis was performed using the computer program PROTEAN (Version 3.11 for the Power MacIntosh, DNASTAR, Inc., 1228 South Park Street Madison, Wis.). Breast, ovarian, breast cancer and/or ovarian cancer associated polypeptides (e.g., SEQ ID NO:Y, polypeptides encoded by SEQ ID NO:X, or polypeptides encoded by the cDNA in the referenced cDNA clone) may possess one or more antigenic epitopes comprising residues described in Table 4. It will be appreciated that depending on the analytical criteria used to predict antigenic determinants, the exact address of the determinant may vary slightly. The residues and locations shown in column two of Table 4 correspond to the amino acid sequences for most breast, ovarian, breast cancer and/or ovarian cancer associated polypeptide sequence shown in the Sequence Listing.

[0026] Table 5 shows the cDNA libraries sequenced, and ATCC designation numbers and vector information relating to these cDNA libraries.

[0027] Definitions

[0028] The following definitions are provided to facilitate understanding of certain terms used throughout this specification.

[0029] In the present invention, “isolated” refers to material removed from its original environment (e.g., the natural environment if it is naturally occurring), and thus is altered “by the hand of man” from its natural state. For example, an isolated polynucleotide could be part of a vector or a composition of matter, or could be contained within a cell, and still be “isolated” because that vector, composition of matter, or particular cell is not the original environment of the polynucleotide. The term “isolated” does not refer to genomic or cDNA libraries, whole cell total or mRNA preparations, genomic DNA preparations (including those separated by electrophoresis and transferred onto blots), sheared whole cell genomic DNA preparations or other compositions where the art demonstrates no distinguishing features of the polynucleotide/sequences of the present invention.

[0030] As used herein, a “polynucleotide” refers to a molecule having a nucleic acid sequence contained in SEQ ID NO:X (as described in column 1 of Table 1) or the related cDNA clone (as described in column 9 of Table 1 and contained within a library deposited with the ATCC). For example, the polynucleotide can contain the nucleotide sequence of the full length cDNA sequence, including the 5′ and 3′ untranslated sequences, the coding region, as well as fragments, epitopes, domains, and variants of the nucleic acid sequence. Moreover, as used herein, a “polypeptide” refers to a molecule having an amino acid sequence encoded by a polynucleotide of the invention as broadly defined (obviously excluding poly-Phenylalanine or poly-Lysine peptide sequences which result from translation of a polyA tail of a sequence corresponding to a cDNA).

[0031] In the present invention, “SEQ ID NO:X” was often generated by overlapping sequences contained in multiple clones (contig analysis). A representative clone containing all or most of the sequence for SEQ ID NO:X is deposited at Human Genome Sciences, Inc. (HGS) in a catalogued and archived library. As shown in column 9 of Table 1, each clone is identified by a cDNA Clone ID. Each Clone ID is unique to an individual clone and the Clone ID is all the information needed to retrieve a given clone from the HGS library. In addition to the individual cDNA clone deposits, most of the cDNA libraries from which the clones were derived were deposited at the American Type Culture Collection (hereinafter “ATCC”). Table 5 provides a list of the deposited cDNA libraries. One can use the Clone ID to determine the library source by reference to Tables 2 and 5. Table 5 lists the deposited cDNA libraries by name and links each library to an ATCC Deposit. Library names contain four characters, for example, “HTWE.” The name of a cDNA clone (“Clone ID”) isolated from that library begins with the same four characters, for example “HTWEP07”. As mentioned below, Table 1 correlates the Clone ID names with SEQ ID NOs. Thus, starting with a SEQ ID NO, one can use Tables 1, 2 and 5 to determine the corresponding Clone ID, from which library it came and in which ATCC deposit the library is contained. Furthermore, it is possible to retrieve a given cDNA clone from the source library by techniques known in the art and described elsewhere herein. The ATCC is located at 10801 University Boulevard, Manassas, Va. 20110-2209, USA. The ATCC deposits were made persuant to the terms of the Budapest Treaty on the international recognition of the deposit of microorganisms for the purposes of patent procedure.

[0032] A “polynucleotide” of the present invention also includes those polynucleotides capable of hybridizing, under stringent hybridization conditions, to sequences contained in SEQ ID NO:X, or the complement thereof (e.g., the complement of any one, two, three, four, or more of the polynucleotide fragments described herein), and/or sequences contained in the related cDNA clone within a library deposited with the ATCC. “Stringent hybridization conditions” refers to an overnight incubation at 42 degree C in a solution comprising 50% formamide, 5× SSC (750 mM NaCl, 75 mM trisodium citrate), 50 mM sodium phosphate (pH 7.6), 5× Denhardt's solution, 10% dextran sulfate, and 20 μg/ml denatured, sheared salmon sperm DNA, followed by washing the filters in 0.1× SSC at about 65 degree C.

[0033] Also included within “polynucleotides” of the present invention are nucleic acid molecules that hybridize to the polynucleotides of the present invention at lower stringency hybridization conditions. Changes in the stringency of hybridization and signal detection are primarily accomplished through the manipulation of formamide concentration (lower percentages of formamide result in lowered stringency); salt conditions, or temperature. For example, lower stringency conditions include an overnight incubation at 37 degree C in a solution comprising 6× SSPE (20× SSPE=3M NaCl; 0.2M NaH₂PO₄; 0.02M EDTA, pH 7.4), 0.5% SDS, 30% formamide, 100 μg/ml salmon sperm blocking DNA; followed by washes at 50 degree C with 1× SSPE, 0.1% SDS. In addition, to achieve even lower stringency, washes performed following stringent hybridization can be done at higher salt concentrations (e.g. 5× SSC).

[0034] Note that variations in the above conditions may be accomplished through the inclusion and/or substitution of alternate blocking reagents used to suppress background in hybridization experiments. Typical blocking reagents include Denhardt's reagent, BLOTTO, heparin, denatured salmon sperm DNA, and commercially available proprietary formulations. The inclusion of specific blocking reagents may require modification of the hybridization conditions described above, due to problems with compatibility.

[0035] Of course, a polynucleotide which hybridizes only to polyA+sequences (such as any 3′ terminal polyA+tract of a cDNA shown in the sequence listing), or to a complementary stretch of T (or U) residues, would not be included in the definition of “polynucleotide,” since such a polynucleotide would hybridize to any nucleic acid molecule containing a poly (A) stretch or the complement thereof (e.g., practically any double-stranded cDNA clone generated using oligo dT as a primer).

[0036] The polynucleotides of the present invention can be composed of any polyribonucleotide or polydeoxribonucleotide, which may be unmodified RNA or DNA or modified RNA or DNA. For example, polynucleotides can be composed of single- and double-stranded DNA, DNA that is a mixture of single- and double-stranded regions, single- and double-stranded RNA, and RNA that is mixture of single- and double-stranded regions, hybrid molecules comprising DNA and RNA that may be single-stranded or, more typically, double-stranded or a mixture of single- and double-stranded regions. In addition, the polynucleotide can be composed of triple-stranded regions comprising RNA or DNA or both RNA and DNA. A polynucleotide may also contain one or more modified bases or DNA or RNA backbones modified for stability or for other reasons. “Modified” bases include, for example, tritylated bases and unusual bases such as inosine. A variety of modifications can be made to DNA and RNA; thus, “polynucleotide” embraces chemically, enzymatically, or metabolically modified forms.

[0037] In specific embodiments, the polynucleotides of the invention are at least 15, at least 30, at least 50, at least 100, at least 125, at least 500, or at least 1000 continuous nucleotides but are less than or equal to 300 kb, 200 kb, 100 kb, 50 kb, 15 kb, 10 kb, 7.5kb, 5 kb, 2.5 kb, 2.0 kb, or 1 kb, in length. In a further embodiment, polynucleotides of the invention comprise a portion of the coding sequences, as disclosed herein, but do not comprise all or a portion of any intron. In another embodiment, the polynucleotides comprising coding sequences do not contain coding sequences of a genomic flanking gene (i.e., 5′ or 3′ to the gene of interest in the genome). In other embodiments, the polynucleotides of the invention do not contain the coding sequence of more than 1000, 500, 250, 100, 50, 25, 20, 15, 10, 5, 4, 3, 2, or 1 genomic flanking gene(s).

[0038] “SEQ ID NO:X” refers to a ovarian and/or breast antigen polynucleotide sequence described in Table 1. SEQ ID NO:X is identified by an integer specified in column 1 of Table 1. The polypeptide sequence SEQ ID NO:Y is a translated open reading frame (ORF) encoded by polynucleotide SEQ ID NO:X. There are 418 ovarian and/or breast antigen polynucleotide sequences described in Table 1 and shown in the sequence listing (SEQ ID NO:1 through SEQ ID NO:418). Likewise there are 418 polypeptide sequences shown in the sequence listing, one polypeptide sequence for each of the polynucleotide sequences (SEQ ID NO:419 through SEQ ID NO:836). The polynucleotide sequences are shown in the sequence listing immediately followed by all of the polypeptide sequences. Thus, a polypeptide sequence corresponding to polynucleotide sequence SEQ ID NO: 1 is the first polypeptide sequence shown in the sequence listing. The second polypeptide sequence corresponds to the polynucleotide sequence shown as SEQ ID NO:2, and so on. In otherwords, since there are 418 polynucleotide sequences, for any polynucleotide sequence SEQ ID NO:X, a corresponding polypeptide SEQ ID NO:Y can be determined by the formula X +418 =Y. In addition, any of the unique “Sequence/Contig ID” defined in column 2 of Table 1, can be linked to the corresponding polypeptide SEQ ID NO:Y by reference to Table 4.

[0039] The polypeptides of the present invention can be composed of amino acids joined to each other by peptide bonds or modified peptide bonds, i.e., peptide isosteres, and may contain amino acids other than the 20 gene-encoded amino acids. The polypeptides may be modified by either natural processes, such as posttranslational processing, or by chemical modification techniques which are well known in the art. Such modifications are well described in basic texts and in more detailed monographs, as well as in a voluminous research literature. Modifications can occur anywhere in a polypeptide, including the peptide backbone, the amino acid side-chains and the amino or carboxyl termini. It will be appreciated that the same type of modification may be present in the same or varying degrees at several sites in a given polypeptide. Also, a given polypeptide may contain many types of modifications. Polypeptides may be branched, for example, as a result of ubiquitination, and they may be cyclic, with or without branching. Cyclic, branched, and branched cyclic polypeptides may result from posttranslation natural processes or may be made by synthetic methods. Modifications include acetylation, acylation, ADP-ribosylation, amidation, covalent attachment of flavin, covalent attachment of a heme moiety, covalent attachment of a nucleotide or nucleotide derivative, covalent attachment of a lipid or lipid derivative, covalent attachment of phosphotidylinositol, cross-linking, cyclization, disulfide bond formation, demethylation, formation of covalent cross-links, formation of cysteine, formation of pyroglutamate, formylation, gamma-carboxylation, glycosylation, GPI anchor formation, hydroxylation, iodination, methylation, myristoylation, oxidation, pegylation, proteolytic processing, phosphorylation, prenylation, racemization, selenoylation, sulfation, transfer-RNA mediated addition of amino acids to proteins such as arginylation, and ubiquitination. (See, for instance, PROTEINS—STRUCTURE AND MOLECULAR PROPERTIES, 2nd Ed., T. E. Creighton, W. H. Freeman and Company, New York (1993); POSTTRANSLATIONAL COVALENT MODIFICATION OF PROTEINS, B. C. Johnson, Ed., Academic Press, New York, pgs. 1-12 (1983); Seifter et al., Meth Enzymol 182:626-646 (1990); Rattan et al., Ann NY Acad Sci 663:48-62 (1992).)

[0040] The breast, ovarian, breast cancer and/or ovarian cancer polypeptides of the invention can be prepared in any suitable manner. Such polypeptides include isolated naturally occurring polypeptides, recombinantly produced polypeptides, synthetically produced polypeptides, or polypeptides produced by a combination of these methods. Means for preparing such polypeptides are well understood in the art.

[0041] The polypeptides may be in the form of the secreted protein, including the mature form, or may be a part of a larger protein, such as a fusion protein (see below). It is often advantageous to include an additional amino acid sequence which contains secretory or leader sequences, pro-sequences, sequences which aid in purification, such as multiple histidine residues, or an additional sequence for stability during recombinant production.

[0042] The breast, ovarian, breast cancer and/or ovarian cancer polypeptides of the present invention are preferably provided in an isolated form, and preferably are substantially purified. A recombinantly produced version of a polypeptide, including the secreted polypeptide, can be substantially purified using techniques described herein or otherwise known in the art, such as, for example, by the one-step method described in Smith and Johnson, Gene 67:31-40 (1988). Polypeptides of the invention also can be purified from natural, synthetic or recombinant sources using techniques described herein or otherwise known in the art, such as, for example, antibodies of the invention raised against the polypeptides of the present invention in methods which are well known in the art.

[0043] By a polypeptide demonstrating a “functional activity” is meant, a polypeptide capable of displaying one or more known functional activities associated with a full-length (complete) protein of the invention. Such functional activities include, but are not limited to, biological activity, antigenicity [ability to bind (or compete with a polypeptide for binding) to an anti-polypeptide antibody], immunogenicity (ability to generate antibody which binds to a specific polypeptide of the invention), ability to form multimers with polypeptides of the invention, and ability to bind to a receptor or ligand for a polypeptide.

[0044] “A polypeptide having functional activity” refers to polypeptides exhibiting activity similar, but not necessarily identical to, an activity of a polypeptide of the present invention, including mature forms, as measured in a particular assay, such as, for example, a biological assay, with or without dose dependency. In the case where dose dependency does exist, it need not be identical to that of the polypeptide, but rather substantially similar to the dose-dependence in a given activity as compared to the polypeptide of the present invention (i.e., the candidate polypeptide will exhibit greater activity or not more than about 25-fold less and, preferably, not more than about tenfold less activity, and most preferably, not more than about three-fold less activity relative to the polypeptide of the present invention).

[0045] The functional activity of the ovarian and/or breast antigen polypeptides, and fragments, variants derivatives, and analogs thereof, can be assayed by various methods.

[0046] For example, in one embodiment where one is assaying for the ability to bind or compete with full-length polypeptide of the present invention for binding to an antibody to the full length polypeptide antibody, various immunoassays known in the art can be used, including but not limited to, competitive and non-competitive assay systems using techniques such as radioimmunoassays, ELISA (enzyme linked immunosorbent assay), “sandwich” immunoassays, immunoradiometric assays, gel diffusion precipitation reactions, immunodiffusion assays, in situ immunoassays (using colloidal gold, enzyme or radioisotope labels, for example), western blots, precipitation reactions, agglutination assays (e.g., gel agglutination assays, hemagglutination assays), complement fixation assays, immunofluorescence assays, protein A assays, and immunoelectrophoresis assays, etc. In one embodiment, antibody binding is detected by detecting a label on the primary antibody. In another embodiment, the primary antibody is detected by detecting binding of a secondary antibody or reagent to the primary antibody. In a further embodiment, the secondary antibody is labeled. Many means are known in the art for detecting binding in an immunoassay and are within the scope of the present invention.

[0047] In another embodiment, where a ligand is identified, or the ability of a polypeptide fragment, variant or derivative of the invention to multimerize is being evaluated, binding can be assayed, e.g., by means well-known in the art, such as, for example, reducing and non-reducing gel chromatography, protein affinity chromatography, and affinity blotting. See generally, Phizicky, E., et al., Microbiol. Rev. 59:94-123 (1995). In another embodiment, physiological correlates polypeptide of the present invention binding to its substrates (signal transduction) can be assayed.

[0048] In addition, assays described herein (see Examples) and otherwise known in the art may routinely be applied to measure the ability of polypeptides of the present invention and fragments, variants derivatives and analogs thereof to elicit polypeptide related biological activity (either in vitro or in vivo). Other methods will be known to the skilled artisan and are within the scope of the invention.

[0049] Breast, Ovarian, Breast Cancer and Ovarian Cancer Associated Polynucleotides and Polypeptides of the Invention

[0050] It has been discovered herein that the polynucleotides described in Table 1 are expressed at significantly enhanced levels in human breast, ovarian, breast cancer and/or ovarian cancer tissues. Accordingly, such polynucleotides, polypeptides encoded by such polynucleotides, and antibodies specific for such polypeptides find use in the prediction, diagnosis, prevention and treatment of disorders related to the female reproductive system, specifically disorders of the breast and/or ovary, including breast cancer and/or ovarian cancer as more fully described below.

[0051] Table 1 summarizes some of the polynucleotides encompassed by the invention (including contig sequences (SEQ ID NO:X) and the related cDNA clones) and further summarizes certain characteristics of these breast, ovarian, breast cancer and/or ovarian cancer associated polynucleotides and the polypeptides encoded thereby.

TABLE 1

| | | | HGS Nucleotide | | | | | |
|---|---|---|---|---|---|---|---|---|
| Seq ID | Sequence/ | | | | | % | % | |
| No. | Contig ID | Gene Name | Overlap | Start | End | Id | Si | Clone ID |
| 1 | 419266 | monoamine oxidase B [Homo sapiens] | gi\|187359 | 2 | 1021 | 95 | 95 | HAGFP75 |
| | | >gi\|187376 monoamine oxidase B [Homo | | | | | | |
| | | sapiens] >bbs\|134021 monoamine oxidase B, | | | | | | |
| | | MAO B [human, platelet, Peptide Partial, 520 | | | | | | |
| | | aa] [Homo sapiens] >pir\|JH0817\|JH0817 | | | | | | |
| | | amine oxidase (flavin-containing) (EC 1.4.3.4) | | | | | | |
| | | B - human> | | | | | | |
| 2 | 429114 | | | 51 | 383 | | | HATDC43 |
| 3 | 506777 | | | 51 | 233 | | | HRGCY74 |
| 4 | 508678 | (AF059293) cytokine-like factor-1 precursor | gi\|3372627 | 3 | 155 | 100 | 100 | HFJJG81 |
| | | [Homo sapiens] >sp\|O75462\|O75462 | | | | | | |
| | | CYTOKINE-LIKE FACTOR-1 | | | | | | |
| | | PRECURSOR. Length = 422 | | | | | | |
| 5 | 508968 | DNA helicase [Homo sapiens] | gi\|619863 | 2 | 739 | 95 | 96 | HHTLH91 |
| | | >pir\|A58836\|A55311 DNA helicase RECQL- | | | | | | |
| | | human Length = 659 | | | | | | |
| 6 | 509029 | | | 770 | 1096 | | | HLMDG72 |
| 7 | 519726 | | | 359 | 529 | | | HCSSB83 |
| 8 | 522632 | | | 3 | 299 | | | HRGBG45 |
| 9 | 524655 | | | 522 | 686 | | | HUSGS36 |
| 10 | 525847 | glyoxalase II [Homo sapiens] | gn\|PID\|e19712 | 1 | 162 | 54 | 73 | H6EDPl4 |
| | | >sp\|Q16775\|GL02_HUMAN | 7 | | | | | |
| | | HYDROXYACYLGLUTATHIONE | | | | | | |
| | | HYDROLASE (EC 3.1.2.6) (GLYOXALASE | | | | | | |
| | | II) (GLX II). Length = 260 | | | | | | |
| 11 | 530306 | | | 239 | 355 | | | HCHCC28 |
| 12 | 532818 | (AF035178) elongation factor 1 A2 | gi\|3098311 | 43 | 441 | 95 | 95 | HAMFD92 |
| | | [Oryctolagus cuniculus] >gi\|38456 elongation | | | | | | |
| | | factor 1 alpha-2 [Homo sapiens] | | | | | | |
| | | >pir\|S35033\|EFHUA2 translation elongation | | | | | | |
| | | factor eEF- 1 alpha-2 chain - human | | | | | | |
| | | >sp\|Q05639\|EF12_HUMAN ELONGATION | | | | | | |
| | | FACTOR 1-ALPHA 2 (EF-1-ALPHA-2) (S | | | | | | |
| 13 | 533385 | | | 1258 | 1827 | | | HTWA042 |
| 14 | 533532 | actin capping protein alpha subunit [Homo | gi\|595255 | 18 | 947 | 95 | 95 | HETCD42 |
| | | sapiens] >gi\|2393732 (AC002543) f-actin | | | | | | |
| | | capping protein alpha-2 subunit [Homo | | | | | | |
| | | sapiens] >sp\|P47755\|CAZ2_HUMAN F- | | | | | | |
| | | ACTIN CAPPING PROTEIN ALPHA-2 | | | | | | |
| | | SUBUNIT (CAPZ). >gi\|433308 capping | | | | | | |
| | | protein alpha [Homo sapiens] {SUB 3-2 | | | | | | |
| 15 | 534852 | (AF041472) ataxin-2 [Mus musculus] | gi\|3005020 | 3 | 869 | 77 | 77 | HCE4Q55 |
| | | >sp\|O070305\|O70305 SPINOCEREBELLAR | | | | | | |
| | | ATAXIA 2 HOMOLOG (ATAXIN-2). | | | | | | |
| | | Length = 1285 | | | | | | |
| 16 | 537910 | R kappa B [Homo sapiens] | gi\|695579 | 3 | 443 | 100 | 100 | HTOAO52 |
| | | >pir\|S52863\|S52863 DNA-binding protein R | | | | | | |
| | | kappa B - human >sp\|Q15312\|Q15312 R | | | | | | |
| | | KAPPA B. Length = 1324 | | | | | | |
| 17 | 538460 | | | 574 | 1026 | | | HSSMY42 |
| 18 | 539577 | transcriptional activator [Homo sapiens] | gi\|902046 | 1 | 540 | 89 | 89 | HKADQ93 |
| | | >gnl\|PID\|d1005685 hSNF2b [Homo sapiens] | | | | | | |
| | | >pir\|845252\|545252 SNF2beta protein - | | | | | | |
| | | human >gi\|40564 13 (ACOO6127) | | | | | | |
| | | SN24_HUMAN; nuclear protein GRB1; | | | | | | |
| | | homeotic gene regulator; SNE2-BETA [Homo | | | | | | |
| | | sapiens] {SUB 814-1474} Length = | | | | | | |
| 19 | 548379 | complement protein C7 precursor [Homo | gi\|179716 | 92 | 1336 | 92 | 92 | HATCK25 |
| | | sapiens] >pir\|A27340\|A27340 complement C7 | | | | | | |
| | | precursor - human >sp\|P1O643\|CO7_HUMAN | | | | | | |
| | | COMPLEMENT COMPONENT C7 | | | | | | |
| | | PRECURSOR. Length = 843 | | | | | | |
| 20 | 548489 | proteasome subunit HsN3 [Homo sapiens] | gnl\|PID\|d10061 | 3 | 857 | 99 | 99 | HCGAF33 |
| | | >pir\|S50147\|S50147 multicatalytic | 92 | | | | | |
| | | endopeptidase complex (EC 3.4.99.46) beta | | | | | | |
| | | chain N3 - human | | | | | | |
| | | >sp\|P28070\|PRCB_HUMAN PROTEASOME | | | | | | |
| | | BETA CHAIN PRECURSOR (EC 3.4.99.46) | | | | | | |
| | | (MACROPAIN BETA CHAIN) | | | | | | |
| | | (MULTICATALYTIC ENDOPEPTIDASE C | | | | | | |
| 21 | 548595 | inosine monophosphate dehydrogenase type II | gi\|602458 | 971 | 1525 | 100 | 100 | HTXEE92 |
| | | [Homo sapiens] >gi\|1702964 inosine | | | | | | |
| | | monophosphate dehydrogenase type II [Homo | | | | | | |
| | | sapiens] >pir\|152303\|A31997 IMP | | | | | | |
| | | dehydrogenase (EC 1.1.1.205)II - human | | | | | | |
| | | >sp\|P12268\|IMD2_HUMAN INOSINE-5′- | | | | | | |
| | | MONOPHOSPHATE DEHYDROGENASE | | | | | | |
| 22 | 549337 | stromelysin-3 precursor [Homo sapiens] | gi\|456257 | 449 | 1081 | 96 | 96 | HJMAF23 |
| | | Length = 488 | | | | | | |
| 23 | 549777 | | | 54 | 293 | | | HPMAC61 |
| 24 | 553091 | pancreatic peptidyiglycine alpha-amidating | bbs\|159681 | 898 | 2598 | 97 | 97 | HEMFU73 |
| | | monooxygenase, PAM=membrane-bound | | | | | | |
| | | isoform {alternatively spliced, clone PAM-3, | | | | | | |
| | | transmembrane domain (Ba region)} [human, | | | | | | |
| | | islet cell tumor cell line QGP-1, Peptide | | | | | | |
| | | Partial, 971 aa] [Homo sapiens] | | | | | | |
| | | >sp\|Q16252\|Q16252 | | | | | | |
| 25 | 553827 | B-CAM gene product [Homo sapiens] | gi\|535179 | 2 | 388 | 80 | 80 | HBHMI67 |
| | | >pir\|137202\|I37202 B-CAM protein - human | | | | | | |
| | | Length = 588 | | | | | | |
| 26 | 556350 | | | 263 | 655 | | | HCHOC59 |
| 27 | 556351 | FKBPS2; 52 kD FK506 binding protein′ | gi\|186390 | 2 | 1216 | 97 | 97 | HE8DF57 |
| | | [Homo sapiens] >pir\|A46372\|A46372 | | | | | | |
| | | immunophulin FKBP52 - human | | | | | | |
| | | >sp\|QO2790\|FKB4_HUMAN P59 PROTEIN | | | | | | |
| | | (HSP BINDNG IMMUNOPHILIN) (HBI) | | | | | | |
| | | (POSSIBLE PEPTIDYL-PROLYL CIS- | | | | | | |
| | | TRANS ISOMERASE) (BC 5.2.1.8) | | | | | | |
| | | (PPIASE) (ROTAMASE) (FKBP5 | | | | | | |
| 28 | 557007 | ubiquitin conjugating enzyme [Homo sapiens] | gi\|388309 | 3 | 698 | 99 | 100 | HTEJK85 |
| | | >pir\|A49630\|A49630 ubiquitin conjugating | | | | | | |
| | | enzyme - human (fragment) Length = 298 | | | | | | |
| 29 | 558140 | (AD001530) putative [Homo sapiens] | gi\|2335055 | 3 | 1070 | 71 | 71 | HKAAM18 |
| | | >sp\|G2335055\|G2335055 XAP-5. | | | | | | |
| | | >gn\|PID\|d1012538 HXC-26 [Homo sapiens] | | | | | | |
| | | {SUB 15-339} >gi\|1203974 XAP-5 gene | | | | | | |
| | | product [Homo sapiens] {SUB 66-339} | | | | | | |
| | | Length = 339 | | | | | | |
| 30 | 558456 | adipocyte lipid-binding protein [Homo] | gi\|178347 | 69 | 332 | 100 | 100 | HISBQ67 |
| | | sapiens] >pir\|A33363\|FZHUF fatty acid- | | | | | | |
| | | binding protein, adipocyte - human | | | | | | |
| | | >sp\|P15090\|FABA_HUMAN FATTY ACID- | | | | | | |
| | | BINDING PROTEIN, ADIPOCYTE | | | | | | |
| | | (AFABP) (ADIPOCYTE LIPD-BINDING | | | | | | |
| | | PROTEIN) (ALBP) (A-FABP). {SUB 2-132} | | | | | | |
| | | Length = 132 | | | | | | |
| 31 | 558708 | N-cadherin [Homo sapiens] Length = 747 | gi\|416293 | 3 | 515 | 79 | 79 | HSYBX61 |
| 32 | 574789 | | | 301 | 402 | | | HLDNM79 |
| 33 | 578203 | | | 2 | 445 | | | H6EDN57 |
| 34 | 585385 | precursor polypeptide (AA -21 to 782) [Homo | gi\|37261 | 99 | 347 | 71 | 71 | HOFMP70 |
| | | sapiens] >pir\|A35954\|A35954 endoplasmin | | | | | | |
| | | precursor - human | | | | | | |
| | | >sp\|P14625\|ENPL_HUMAN | | | | | | |
| | | ENDOPLASMIN PRECURSOR (94 KD | | | | | | |
| | | GLUCOSE-REGULATED PROTEIN) | | | | | | |
| | | (GRP94) (GP96 HOMOLOG) (TUMOR | | | | | | |
| | | REJECTION ANTIGEN 1). Length = 803 | | | | | | |
| 35 | 588869 | leukocyte adhesion glycoprotein precursor | gi\|307114 | 1 | 720 | 98 | 98 | HDPFK39 |
| | | [Homo sapiens] Length = 1152 | | | | | | |
| 36 | 597076 | preferentially expressed antigen of melanoma | gi\|1903384 | 80 | 811 | 77 | 77 | HETHE66 |
| | | [Homo sapiens] >sp\|P78395\|P78395 | | | | | | |
| | | PREFERENTIALLY EXPRESSED | | | | | | |
| | | ANTIGEN OF MELANOMA. Length = 509 | | | | | | |
| 37 | 598656 | sigma receptor[Homo sapiens]>gi\|1916800 | gi\|1783387 | 3 | 587 | 100 | 100 | HMEIY05 |
| | | SR31747 binding protein 1 [Homo sapiens] | | | | | | |
| | | >gi\|2914740 (AF001977) type I sigma | | | | | | |
| | | receptor [Homo sapiens] >pir\|JC5266\|JC5266 | | | | | | |
| | | sigma receptor 1 - human | | | | | | |
| | | >sp\|Q99720\|Q99720 SIGMA RECEPTOR. | | | | | | |
| | | Length = 223 | | | | | | |
| 38 | 611880 | Acetyl-CoA:acetyltransferase (EC 2.3.1.9) | gnl\|PID\|d10167 | 1 | 108 | 100 | 100 | HOVAS88 |
| | | (Acetoacetyl-CoA thiolase). [Escherichia coli] | 45 | | | | | |
| | | >gi\|1788554 (AE000311) acetyl-CoA | | | | | | |
| | | acetyltransferase [Escherichia coli] | | | | | | |
| | | >pir\|F64992\|F64992 hypothetical protein | | | | | | |
| | | b2224 - Escherichia coli (strain K-12) | | | | | | |
| | | >sp\|P76461\|ATOB_{—} | | | | | | |
| 39 | 614329 | ORF, HETR-1; pot. neuroblastoma-associated | gi\|490013 | 300 | 755 | 86 | 86 | HFPCQO2 |
| | | regulator [Homo sapiens] >gi\|395338 helix- | | | | | | |
| | | loop-helix protein [Homo sapiens] >gi\|512437 | | | | | | |
| | | HEIR-1 [Homo sapiens] {SUB 30-148} | | | | | | |
| | | Length = 148 | | | | | | |
| 40 | 616066 | | | 121 | 213 | | | HSIGC05 |
| 41 | 620956 | ribosomal protein S9 [Rattus norvegicus] | gi\|57143 | 3 | 473 | 95 | 97 | HOFOB28 |
| | | >pir\|JNO587\|S21497 ribosomal protein S9 - | | | | | | |
| | | rat Length = 194 | | | | | | |
| 42 | 621889 | unnamed protein product [unidentified] | gnl]PID]e30612 | 16 | 423 | 95 | 97 | HOFOC44 |
| | | >gi\|468550 CCT (chaperonin containing TCP- | 9 | | | | | |
| | | 1) epsilon subunit [Mus musculus] | | | | | | |
| | | >pir\|S43061\|S43061 t-complex-type | | | | | | |
| | | molecular chaperone Ccte - mouse Length = | | | | | | |
| | | 541 | | | | | | |
| 43 | 624017 | (AB003732) polyubiquitin [Cricetulus | gi\|2627133 | 1 | 1170 | 95 | 97 | HMCBS12 |
| | | griseus] >sp\|O35080\|O35080 | | | | | | |
| | | POLYUBIQUITIN. >gi\|4105408 (AF045474) | | | | | | |
| | | polyubiquitin [Schistosoma mansoni] {SUB | | | | | | |
| | | 694-988} Length 1038 | | | | | | |
| 44 | 651784 | histone H2A.X [Homo sapiens] | gi\|31973 | 2 | 514 | 98 | 98 | HKGAJ94 |
| | | >pir\|S07631\|S07631 histone H2A.X - human | | | | | | |
| | | >sp\|P16104\|H2AX_HUMAN HISTONE | | | | | | |
| | | H2A.X. {SUB 2-143} Length = 143 | | | | | | |
| 45 | 651826 | keratin, 55K type II cytoskeletal - human | pir\|B24177\|B24 | 2 | 1300 | 86 | 86 | HNTAH42 |
| | | (fragment) Length = 489 | 177 | | | | | |
| 46 | 653282 | phosphate transfer protein B precursor, | pir\|D53737\|D53 | 30 | 392 | 90 | 90 | HOFNY90 |
| | | niitochodrial - bovine Length = 361 | 737 | | | | | |
| 47 | 657122 | | | 1 | 204 | | | HKGAQ13 |
| 48 | 661442 | rabiB protein (AA 1-201) [Rattus sp.] | gi\|57006 | 1 | 672 | 98 | 99 | HCHMI33 |
| | | Length = 201 | | | | | | |
| 49 | 664914 | phosphotyrosyl phosphatase activator | gi\|509144 | 1 | 228 | 98 | 100 | HEGAK11 |
| | | [Oryctolagus duniculus] >pir\|B54021\|B54021 | | | | | | |
| | | phosphotyrosyl phosphatase activator PTPA - | | | | | | |
| | | rabbit >sp\|Q28717\|Q28717 | | | | | | |
| | | PHOSPHOTYROSYL PHOSPHATASE | | | | | | |
| | | ACTIVATOR. Length = 323 | | | | | | |
| 50 | 666654 | | | 63 | 395 | | | HOFNL37 |
| 51 | 667084 | cytokeratin 17 [Homo sapiens] >gi\|34075 | gi\|30379 | 3 | 1379 | 100 | 100 | HKADA74 |
| | | keratin related product [Homo sapiens] | | | | | | |
| | | >pir\|S30433\|S30433 keratin 17, cytoskeletal - | | | | | | |
| | | human >sp\|QO4695\|K1CQ_HUMAN | | | | | | |
| | | KERATIN, TYPE I CYTOSKELETAL 17 | | | | | | |
| | | (CYTOKERATIN 17) (K17) (CK 17) (39.1) | | | | | | |
| | | (VERSION 1). {SUB 2-432} Length | | | | | | |
| 52 | 667380 | cell surface glycoprotein [Homo sapiens] | gn\|IPID\|d10019 | 1 | 474 | 100 | 100 | HMIBK53 |
| | | >gnl\|PID\|d1006754 TALLA-1 [Homo | 76 | | | | | |
| | | sapiens] >gnl\|PID\|d1001976 cell surface | | | | | | |
| | | glycoprotein [Homo sapiens] | | | | | | |
| | | >pir\|I39368\|I39368 T-cell acute lymphoblastic | | | | | | |
| | | leukemia associated antigen 1 - human | | | | | | |
| | | >sp\|P41732\|A15_HUMAN CELL SURF | | | | | | |
| 53 | 669530 | | | 264 | 440 | | | HPFCJ30 |
| 54 | 671315 | cell cycle checkpoint control protein [Homo | gi\|1765956 | 320 | 1279 | 92 | 92 | HDABE95 |
| | | sapiens] >sp\|Q99638\|Q99638 CELL CYCLE | | | | | | |
| | | CHECKPOINT CONTROL PROTEIN. | | | | | | |
| | | Length = 391 | | | | | | |
| 55 | 671993 | NAD(H)-specific isocitrate dehydrogenase | gnl\|PID\|e21191 | 1 | 993 | 91 | 91 | HSJCA89 |
| | | gamma-subunit precursor [Homo sapiens] | 9 | | | | | |
| | | >gnl\|PID\|e219959 NAD (H)-specific isocitrate | | | | | | |
| | | dehydrogenase gamma subunit precursor | | | | | | |
| | | [Homo sapiens] >gi\|1302655 NAD+-isocitrate | | | | | | |
| | | dehydrogenase gamma subunit [Homo | | | | | | |
| | | sapiens] >gi\|40 | | | | | | |
| 56 | 674618 | | | 223 | 312 | | | HOVBX22 |
| 57 | 675027 | | | 789 | 1160 | | | HSDII69 |
| 58 | 677202 | vimentin [Homo sapiens] >sp\|Q15867\|Q15867 | gi\|340232 | 705 | 896 | 100 | 100 | HWACG51 |
| | | VIMENTIN (FRAGMENT). Length = 354 | | | | | | |
| 59 | 678504 | ORF YGRO31w [Saccharomyces cerevisiae] | gnl\|PID\|e24327 | 320 | 640 | 38 | 63 | HCHAG27 |
| | | >pir\|S64322\|S64322 probable membrane | 7 | | | | | |
| | | protein YGRO31w - yeast (Saccharomyces | | | | | | |
| | | cerevisiae) Length = 342 | | | | | | |
| 60 | 678985 | 54 kDa protein [Homo sapiens] | gi\|407308 | 358 | 1203 | 100 | 100 | HCHOL54 |
| | | >gnl\|PID\|e1245514 ps4nrb [Homo sapiens] | | | | | | |
| | | >pir\|G01211\|G0121154 kDa protein - human | | | | | | |
| | | >sp\|Q12786\|Q12786 54 KDA PROTEIN. | | | | | | |
| | | Length = 471 | | | | | | |
| 61 | 682161 | (AF036241) Na+/H+ exchange regulatory co- | gi\|2920585 | 3 | 869 | 89 | 89 | HCHAG19 |
| | | factor [Homo sapiens] >gi\|3220019 | | | | | | |
| | | (AFO 15926) ezrin-radixin-moesin binding | | | | | | |
| | | phosphoprotein-50 [Homo sapiens] | | | | | | |
| | | >sp\|O14745\|O14745 EZRIN-RADIXIN- | | | | | | |
| | | MOESIN BINDING PHOSPHOPROTEIN- | | | | | | |
| | | 50. Length = 358 | | | | | | |
| 62 | 683476 | | | 1 | 132 | | | HOFMM27 |
| 63 | 691146 | KDEL receptor [Homo sapiens] | gi\|34031 | 1 | 372 | 100 | 100 | HDABB02 |
| | | >pir\|S13293\|S13293 KDEL receptor - human | | | | | | |
| | | >sp\|P24390\|ER21_HUMAN ER LUMEN | | | | | | |
| | | PROTEIN RETAINING RECEPTOR 1 | | | | | | |
| | | (KDEL RECEPTOR 1). Length = 212 | | | | | | |
| 64 | 693589 | | | 1 | 393 | | | HCHAS12 |
| 65 | 694991 | B4B gene product [Homo sapiens] | gnl\|PID\|e19494 | 1 | 663 | 98 | 98 | HRAAY77 |
| | | >gnl\|PID\|e265628 progression associated | 6 | | | | | |
| | | protein [Homo sapiens] >gi\|1932786 epithelial | | | | | | |
| | | membrane protein [Homo sapiens] | | | | | | |
| | | >gi\|2506160 TMP [Homo sapiens] | | | | | | |
| | | >sp\|P54849\|EMP1_HUMAN EPITHELIAL | | | | | | |
| | | MEMBRANE PROTEIN-1 (EMP-1) | | | | | | |
| | | (TUMOR-ASSOCIA | | | | | | |
| 66 | 698303 | heat shock factor 1 [Homo sapiens] | gi\|184403 | 23 | 1168 | 85 | 85 | HSHCA55 |
| | | >pir\|A4l137\|A41137 heat shock transcription | | | | | | |
| | | factor 1 - human >sp\|Q00613\|HSF1_HUMAN | | | | | | |
| | | HEAT SHOCK FACTOR PROTEIN 1 (HSF | | | | | | |
| | | 1) (HEAT SHOCK TRANSCRIPTION | | | | | | |
| | | FACTOR 1) (HSTF 1). Length = 529 | | | | | | |
| 67 | 698669 | filamin [Homo sapiens] Length = 2647 | gi\|1203969 | 27 | 1274 | 98 | 98 | HEGAR20 |
| 68 | 705696 | | | 321 | 458 | | | HOFMP28 |
| 69 | 706393 | vacuolar H+ ATPase proton channel subunit | gi\|189676 | 119 | 604 | 84 | 85 | HSKHP64 |
| | | [Homo sapiens] >pir\|A39367\|A39367 H+- | | | | | | |
| | | transporting ATPase (BC 3.6.1.35) chain | | | | | | |
| | | PKD1 - human Length = 155 | | | | | | |
| 70 | 707357 | | | 3 | 344 | | | HOFMM35 |
| 71 | 707360 | leucine aminopeptidase, LAP [cattle, kidney, | bbs\|137417 | 1 | 447 | 81 | 89 | HOFOF35 |
| | | Peptide, 513 aa] [Bos taurus] | | | | | | |
| | | >pir\|A54338\|APBOL leucyl aminopeptidase | | | | | | |
| | | (EC 3.4.11.1), renal - bovine | | | | | | |
| | | >sp\|P00727\|AMPL_BOVIN CYTOSOL | | | | | | |
| | | AMINOPEPTIDASE (BC 3.4.11.1) | | | | | | |
| | | (LEUCINIE AMINOPEPTIDASE) (LAP) | | | | | | |
| | | (LEUCYL AMINOPEPTIDA | | | | | | |
| 72 | 707375 | serine/threonine protein kinase [Homo | gi\|36619 | 2 | 1582 | 92 | 92 | HTOJQ73 |
| | | sapiens] >pir\|S23385\|S23385 protein kinase | | | | | | |
| | | (EC 2.7.1.37) cdc2-related PCTAIRE-1 - | | | | | | |
| | | human >sp\|Q00536\|KPT1_HUMAN | | | | | | |
| | | SERINE/THREONINE-PROTEIN KINASE | | | | | | |
| | | PCTAIRE-1 (EC 2.7.1.-). | | | | | | |
| | | >sp\|G252370\|G252370 CDC2-RELATED | | | | | | |
| | | PROTEIN KINASE {CL | | | | | | |
| 73 | 707754 | | | 2 | 376 | | | HLDBT45 |
| 74 | 711172 | | | 237 | 395 | | | HOVCJ40 |
| 75 | 712248 | transcription factor AP-2 beta [Homo sapiens] | gnl\|PID\|e28653 | 99 | 344 | 100 | 100 | HKGCW94 |
| | | >sp\|E286536\|E286536 TRANSCRIPTION | 6 | | | | | |
| | | FACTOR AP-2 BETA. Length = 367 | | | | | | |
| 76 | 715445 | DNA-PK [Homo sapiens] | gi\|1017757 | 119 | 988 | 99 | 99 | HLTDJ07 |
| | | >pir\|G02O83\|G02083 DNA-PK-human | | | | | | |
| | | (fragment) >sp\|Q13337\|Q13337 DNA-PK | | | | | | |
| | | (FRAGMENT). Length = 930 | | | | | | |
| 77 | 716362 | | | 221 | 688 | | | HBGBC77 |
| 78 | 716835 | (AF036241) Na+/H+ exchange regulatory co- | gi\|2920585 | 3 | 755 | 79 | 79 | HCHAI81 |
| | | factor [Homo sapiens] >gi\|3220019 | | | | | | |
| | | (AFO15926) ezrin-radixin-moesin binding | | | | | | |
| | | phosphoprotein-50 [Homo sapiens] | | | | | | |
| | | >sp\|O14745\|O14745 EZRIN-RADIXIN- | | | | | | |
| | | MOESIN BINDING PHOSPHOPROTEIN- | | | | | | |
| | | 50. Length = 358 | | | | | | |
| 79 | 716947 | SRp55-2 [Homo sapiens] Length = 135 | gi\|1049084 | 2 | 145 | 100 | 100 | HADDY71 |
| 80 | 717685 | alpha-mannosidase [Homo sapiens] Length = | gi\|1419374 | 2 | 1120 | 99 | 99 | HDPUO15 |
| | | 987 | | | | | | |
| 81 | 719755 | | | 89 | 802 | | | HCGAC54 |
| 82 | 720389 | inducible membrane protein [Homo sapiens] | gi\|35833 | 1 | 594 | 65 | 67 | HUVCR41 |
| | | >gi\|806806 cell surface glycoprotein [Homo | | | | | | |
| | | sapiens] >gi\|1832296 metastasis suppressor | | | | | | |
| | | [Homo sapiens] >pir\|138942\|A46493 | | | | | | |
| | | metastasis suppressor KAIl - human | | | | | | |
| | | >sp\|P27701\|CD82_HUMAN CD82 | | | | | | |
| | | ANTIGEN (INDUCIBLE MEMBRANE PRO | | | | | | |
| 83 | 720903 | cDNA isolated for this protein using a | gnl\|PID\|e10316 | 108 | 614 | 93 | 95 | HFVIH35 |
| | | monoclonal antibody directed against the p27k | 1 | | | | | |
| | | prosomal protein [Homo sapiens] Length = | | | | | | |
| | | 266 | | | | | | |
| 84 | 721348 | G6PD (AA 1-515) [Homo sapiens] | gi\|31543 | 545 | 2065 | 93 | 93 | HSHBL14 |
| | | >sp\|P11413\|G6PD_HUMAN GLUCOSE-6- | | | | | | |
| | | PHOSPHATE 1-DEHYDROGENASE (EC | | | | | | |
| | | 1.1.1.49) (G6PD). {SUB 2-515}>gi\|439445 | | | | | | |
| | | glucose-6-phosphate dehydrogenase | | | | | | |
| | | [Dideiphis virginiana] {SUB 258-288} | | | | | | |
| | | >sp\|O46666\|O46666 GLUCOSE-6- | | | | | | |
| | | PHOSPHATE DEHYDROGENAS | | | | | | |
| 85 | 721562 | pescadillo [Homo sapiens] | gi\|2194203 | 32 | 811 | 99 | 99 | HCFCK84 |
| | | >sp\|O0054\|O00541 PESCADILLO. Length = | | | | | | |
| | | 588 | | | | | | |
| 86 | 722775 | | | 409 | 1680 | | | HCHAD52 |
| 87 | 724463 | | | 126 | 335 | | | HOFMP50 |
| 88 | 727501 | SWI/SNF complex 170 KDa subunit [Homo | gi\|1549241 | 1 | 1302 | 97 | 97 | HLYBV46 |
| | | sapiens] >sp\|Q92923\|Q92923 SWI/SNF | | | | | | |
| | | COMPLEX 170 KDA SUBUNIT. Length = | | | | | | |
| | | 1213 | | | | | | |
| 89 | 728418 | GTP binding protein [Mus musculus] | gi\|53169 | 3 | 911 | 93 | 96 | HSSEP09 |
| | | >pir\|A39611\|A39611 probable GTP-binding | | | | | | |
| | | protein - mouse >sp\|P23249\|MV10_MOUSE | | | | | | |
| | | PROTEIN MOV-10. >gi\|433685 gb 110 /Mov | | | | | | |
| | | 10 locus gene product [Mus musculus] {SUB | | | | | | |
| | | 1-45} Length= 1004 | | | | | | |
| 90 | 728920 | adipophilin [Homo sapiens] | gnl\|PID\|e29275 | 2 | 751 | 89 | 89 | HLDRQ71 |
| | | >sp\|Q99541\|Q99541 ADIPOPHLIN | 2 | | | | | |
| | | (FRAGMENT). Length = 437 | | | | | | |
| 91 | 732958 | | | 3 | 296 | | | HPTYA52 |
| 92 | 733134 | NF45 protein [Homo sapiens] | gi\|532313 | 84 | 1259 | 100 | 100 | HHBHP80 |
| | | >pir\|A54857\|A54857 transcription factor NF- | | | | | | |
| | | AT 45K chain - human >sp\|Q12905\|Q12905 | | | | | | |
| | | NF45 PROTEIN. Length = 406 | | | | | | |
| 93 | 734099 | | | 150 | 365 | | | HBGDI44 |
| 94 | 734599 | | | 163 | 705 | | | H6EED05 |
| 95 | 736019 | ribosomal protein L11 [Homo sapiens] | gi\|3115334 | 3 | 608 | 100 | 100 | HSEBB02 |
| | | >gi\|57678 ribosomal protein L11 [Rattus | | | | | | |
| | | rattus] >pir\|S17351\|R5RT11 ribosomal protein | | | | | | |
| | | L11 precursor - rat >sp\|G3115334\|G3115334 | | | | | | |
| | | RIBOSOMAL PROTEIN L11. | | | | | | |
| | | >sp\|D1026769\|D1026769 RIBOSOMAL | | | | | | |
| | | PROTEIN L11 (FRAGMENT). {SUB 17-52} | | | | | | |
| 96 | 738268 | | | 45 | 233 | | | HE2OC41 |
| 97 | 738911 | (AF069291)hT4l [Homo sapiens] | gi\|3687829 | 3 | 656 | 40 | 62 | HCHCI12 |
| | | >sp\|G3687829\|G3687829 HT41. Length = | | | | | | |
| | | 505 | | | | | | |
| 98 | 739226 | | | 3 | 125 | | | HADFY59 |
| 99 | 739527 | | | 3 | 752 | | | HACCL62 |
| 100 | 740710 | acyl-CoA synthetase-like protein [Homo | gnl\|PID\|e32129 | 8 | 307 | 96 | 100 | HPMFQ72 |
| | | sapiens] Length = 670 | 6 | | | | | |
| 101 | 742980 | serine-threonine specific protein phosphatase | gnl\|PID\|e13346 | 3 | 182 | 81 | 86 | HSKCE51 |
| | | [Homo sapiens] >sp\|E1334695\|E1334695 | 95 | | | | | |
| | | SERINE-TITREONINE SPECIFIC PROTEIN | | | | | | |
| | | PHOSPHATASE (EC 3.1.3.16). Length = 317 | | | | | | |
| 102 | 744331 | ZINC FINGER PROTEIN {N-TERMINAL}. | sp\|G632682\|G6 | 432 | 791 | 62 | 80 | HCHAH75 |
| | | Length = 77 | 32682 | | | | | |
| 103 | 744751 | collagen alpha 3(VI) chain precursor - human | pir\|S13679\|CG | 902 | 1189 | 100 | 100 | HUFFV63 |
| | | Length = 2970 | HU3A | | | | | |
| 104 | 745750 | | | 349 | 714 | | | HCEHX66 |
| 105 | 746285 | | | 2016 | 2297 | | | HNTNQ78 |
| 106 | 746416 | (AB013357) 49 kDa zinc finger protein [Mus | gnl\|PID\|d10380 | 113 | 391 | 97 | 97 | HOFMO90 |
| | | musculus] Length 460 | 83 | | | | | |
| 107 | 747851 | (AF035387) C7-1 protein [Rattus norvegicus] | gi\|2655418 | 3 | 974 | 78 | 80 | HSSJG21 |
| | | >sp\|054715\|054715 C7-1 PROTEIN. Length = | | | | | | |
| | | 463 | | | | | | |
| 108 | 750632 | | | 252 | 449 | | | HOGBF68 |
| 109 | 751315 | | | 423 | 608 | | | HLTGN10 |
| 110 | 754009 | | | 408 | 773 | | | HE8PN81 |
| 111 | 754634 | | | 525 | 1070 | | | HUSGH70 |
| 112 | 756637 | (AF044127) peroxisomal short-chain alcohol | gi\|4105190 | 38 | 586 | 89 | 91 | HMWIY27 |
| | | dehydrogenase [Homo sapiens] | | | | | | |
| | | >sp\|G4105190\|G4105190 PEROXISOMAL | | | | | | |
| | | SHORT-CHAIN ALCOHOL | | | | | | |
| | | DEHYDROGENASE. Length = 260 | | | | | | |
| 113 | 756833 | | | 1 | 387 | | | HCEDP17 |
| 114 | 756878 | | | 127 | 399 | | | HIBDE92 |
| 115 | 757332 | cytokeratin 8 [Homo sapiens] >gi\|553163 | gi\|181573 | 35 | 235 | 96 | 100 | HOFMI52 |
| | | keratin 8 [Homo sapiens] {SUB 1-231} | | | | | | |
| | | Length = 482 | | | | | | |
| 116 | 760835 | Pectinase gene transcriptional regulator. | gnl\|PID\|d10159 | 3 | 434 | 100 | 100 | HE9BW44 |
| | | [Escherichia coli] >gnl\|PID\|d1015936 | 28 | | | | | |
| | | Pectinase gene transcriptional regulator. | | | | | | |
| | | [Escherichia coli] >gi\|1787806 (AE000250) | | | | | | |
| | | putative transcriptional regulator LYSR-type | | | | | | |
| | | [Escherichia coli] >pir\|A64907\|A64907 | | | | | | |
| | | hypotheti | | | | | | |
| 117 | 761760 | F45G2.10 [Caenorhabditis elegans] | gnl\|PID\|e13467 | 3 | 527 | 61 | 81 | HMWTF41 |
| | | >sp\|O62252\|O622S2 F45G2.10 PROTEIN. | 24 | | | | | |
| | | Length = 160 | | | | | | |
| 118 | 762520 | B-myb protein (AA 1-700) [Homo sapiens] | gi\|29472 | 77 | 520 | 100 | 100 | HBJJB76 |
| | | >pir\|S01991\|S01991 transforming protein B- | | | | | | |
| | | myb - human >sp\|PI0244\|MYBB_HUMAN | | | | | | |
| | | MYB-RELATED PROTEIN B (B-MYB). | | | | | | |
| | | Length = 700 | | | | | | |
| 119 | 764461 | | | 2 | 211 | | | HOFMH95 |
| 120 | 764517 | phosphomevalonate kinase [Homo sapiens] | gi\|1294782 | 260 | 877 | 100 | 100 | HCGAA73 |
| | | >sp\|Q15126\|PMKA_HUMAN | | | | | | |
| | | PHOSPHOMEVALONATE KINASE (EC | | | | | | |
| | | 2.7.4.2) (PMKASE). {SUB 2-192} | | | | | | |
| | | >gi\|3445542 (AF026069) phosphomevalonate | | | | | | |
| | | kinase [Homo sapiens] {SUB 33-192} Length = | | | | | | |
| | | 192 | | | | | | |
| 121 | 765132 | clk1; putative [Homo sapiens] | gi\|632964 | 1202 | 2251 | 99 | 99 | HE9QA05 |
| | | >pir\|S53641\|S53641 protein kinase clk1 (EC | | | | | | |
| | | 2.7.1.-) - human >sp\|P49759\|CLK1_HUMAN | | | | | | |
| | | PROTEIN KINASE CLK1 (BC 2.7.1.-) | | | | | | |
| | | (CLK). Length = 484 | | | | | | |
| 122 | 765667 | (AF043250) mitochondrial outer membrane | gi\|3941342 | 144 | 1115 | 91 | 91 | HCHOB54 |
| | | protein [Homo sapiens] >gi\|3941347 | | | | | | |
| | | (AF043253) mitochondrial outer membrane | | | | | | |
| | | protein [Homo sapiens] >gi\|4105703 | | | | | | |
| | | (AFOSO154) D19S1177E [Homo sapiens] | | | | | | |
| | | >sp\|G3941342\|G3941342 | | | | | | |
| | | MITOCHONDRIAL OUTER MEMBRANE | | | | | | |
| | | PROTEIN. >sp\|G3941 | | | | | | |
| 123 | 767113 | putative progesterone binding protein [Homo | gnl\|PID\|e31417 | 66 | 677 | 93 | 93 | HNTMW26 |
| | | sapiens] >sp\|O00264\|O00264 PUTATIVE | 4 | | | | | |
| | | PROGESTERONE BINDING PROTEIN. | | | | | | |
| | | Length = 195 | | | | | | |
| 124 | 767204 | cytochrome P45011C4 [Oryctolagus cuniculus] | gi\|164933 | 3 | 581 | 43 | 61 | HCHAN75 |
| | | >pir\|S20227\|S20227 cytochrome P450 2C4 - | | | | | | |
| | | rabbit (fragment) >sp\|Q29507\|Q29507 | | | | | | |
| | | CYTOCHROME P450 (EC 1.14.14.1) | | | | | | |
| | | (FRAGMENT). Length = 145 | | | | | | |
| 125 | 767400 | | | 2 | 1057 | | | HSYBI74 |
| 126 | 767962 | proteasome subunit C3 [Homo sapiens] | gnl\|PID\|d10011 | 3 | 722 | 100 | 100 | HABAF63 |
| | | >pir\|S15970\|SNHUC3 multicatalytic | 15 | | | | | |
| | | endopeptidase complex (EC 3.4.99.46) chain | | | | | | |
| | | C3 - human >sp\|P25787\|PRC3_HUMAN | | | | | | |
| | | PROTEASOME COMPONENT C3 (EC | | | | | | |
| | | 3.4.99.46) (MACROPAIN SUBUNIT C3) | | | | | | |
| | | (MULTICATALYTIC ENDOPEPTIDASE | | | | | | |
| | | COMPLEX SUBUNIT | | | | | | |
| 127 | 768040 | (AB002086) p47 [Rattus norvegicus] | gnl\|PID\|d10225 | 119 | 661 | 84 | 89 | HSRDI53 |
| | | >gnl\|PID\|e294068 XY40 protein [Rattus | 09 | | | | | |
| | | norvegicus] >sp\|O35987\|O35987 P47, | | | | | | |
| | | COMPLETE CDS. Length = 370 | | | | | | |
| 128 | 769956 | adenine phosphoribosyltransferase [Homo | gi\|178867 | 2 | 592 | 100 | 100 | HUFFC71 |
| | | sapiens] >gi\|28819 adenine | | | | | | |
| | | phosphoribosyltransferase (aprt) [Homo | | | | | | |
| | | sapiens] >pir\|SO6232\|RTHUA adenine | | | | | | |
| | | phosphoribosyltransferase (EC 2.4.2.7) - | | | | | | |
| | | human >sp\|P07741\|APT_HUMAN ADENINE | | | | | | |
| | | PHOSPHORIBOSYLTRANSIFERASE (EC | | | | | | |
| | | 2.4.2.7) | | | | | | |
| 129 | 770133 | | | 958 | 1236 | | | HUSAX93 |
| 130 | 770289 | ALDH7 [Homo sapiens] >pir\|138669\|I38669 | gi\|601780 | 194 | 340 | 65 | 69 | HCHAO38 |
| | | ALDH7 - human | | | | | | |
| | | >sp\|P43353\|DHA7_HUMAN ALDEHYDE | | | | | | |
| | | DEHYDROGENASE 7 (EC 1.2.1.5). | | | | | | |
| | | >sp\|G601780\|G601780 ALDH7. Length = 468 | | | | | | |
| 131 | 771964 | (AD000092) human RAD23A homolog | gi\|1905912 | 29 | 1165 | 76 | 76 | HAMGD77 |
| | | [Homo sapiens] >gnl\|PID\|d1005299 HHR23A | | | | | | |
| | | protein [Homo sapiens] >pir\|S444431544443 | | | | | | |
| | | RAD23 protein homolog2 - human Length = | | | | | | |
| | | 363 | | | | | | |
| 132 | 772582 | B-myb protein (AA 1-700) [Homo sapiens] | gi\|29472 | 150 | 974 | 99 | 99 | HYAAO51 |
| | | >pir\|S01991\|S01991 transforming protein B- | | | | | | |
| | | myb - human >sp\|P10244\|MYBB_HUMAN | | | | | | |
| | | MYB-RELATED PROTEIN B (B-MYB). | | | | | | |
| | | Length = 700 | | | | | | |
| 133 | 773387 | zinc finger protein [Homo sapiens] | gi\|495576 | 152 | 634 | 46 | 64 | HAJBC78 |
| | | >pir\|I38620\|I38620 zinc finger protein | | | | | | |
| | | ZNE 155 - human (fragment) Length = 139 | | | | | | |
| 134 | 773827 | novel serine protease, PRSS1 1 [Homo | gnl\|PID\|e27518 | 3 | 1217 | 100 | 100 | HKADF15 |
| | | sapiens] >gnl\|PID\|d1014012 serin protease | 6 | | | | | |
| | | with \|GF-binding motif [Homo sapiens] | | | | | | |
| | | >sp\|Q92743\|Q92743 NOVEL SERINE | | | | | | |
| | | PROTEASE. Length = 480 | | | | | | |
| 135 | 774108 | protein of unknown function [Homo sapiens] | gi\|189379 | 303 | 623 | 75 | 75 | HEGAC01 |
| | | >pir\|C35826\|C35826 hypothetical protein A, | | | | | | |
| | | 13K - human >5p\|Q00994\|HG74_HUMAN | | | | | | |
| | | OVARIAN GRANULOSA CELL 13.0 KD | | | | | | |
| | | PROTEIN HGR74. Length = 111 | | | | | | |
| 136 | 774636 | glutathione transferase [Homo sapiens] | gi\|183301 | 61 | 747 | 98 | 98 | HISDV78 |
| | | >pir\|A39375\|A39375 glutathione transferase | | | | | | |
| | | (EC 2.5.1.18) class mu, GSTM2 - human | | | | | | |
| | | >sp\|P28161\|GTM2_HUMAN | | | | | | |
| | | GLUTATHIONE S-TRANSFERASE MU 2 | | | | | | |
| | | (EC 2.5.1.18) (GSTM2-2) (CLASS-MU). | | | | | | |
| | | {SUB 2-218} >gnl\|PID\|e33921 glutathione | | | | | | |
| | | transf | | | | | | |
| 137 | 775339 | SWI/SNF complex 60 KDa subunit [Homo | gi\|1549243 | 3 | 320 | 98 | 100 | HSIGB35 |
| | | sapiens] >sp\|Q92924\|Q92924 SWI/SNF | | | | | | |
| | | COMPLEX 60 KDA SUBUNIT. Length = | | | | | | |
| | | 435 | | | | | | |
| 138 | 775582 | | | 448 | 705 | | | HEPNB30 |
| 139 | 775779 | (AJ000332) Glucosidase II [Homo sapiens] | gnl\|PID\|e32814 | 1 | 1695 | 98 | 98 | HLWAS86 |
| | | >sp\|Q14697\|Q14697 GLUCOSIDASE II | 3 | | | | | |
| | | PRECURSOR (KIAA0088). | | | | | | |
| | | >gnl\|PID\|d1008224 The ha 1225 gene product | | | | | | |
| | | is related to human alpha-glucosidase. [Homo | | | | | | |
| | | sapiens] {SUB 2-944} Length = 944 | | | | | | |
| 140 | 777809 | cysteine-rich protein 2 [Homo sapiens] | gi\|1399028 | 202 | 681 | 99 | 100 | HSPMB57 |
| | | >gnl\|PID\|d1008288 ESP1/CRP2 [Homo | | | | | | |
| | | sapiens] >pir\|G02090\|G02090 cysteine-rich | | | | | | |
| | | protein 2 - human | | | | | | |
| | | >sp\|P52943\|CRP2_HUMAN CYSTElNE- | | | | | | |
| | | RICH PROTEIN 2 (CRP2) (ESP1 | | | | | | |
| | | PROTEIN). Length = 208 | | | | | | |
| 141 | 778927 | valyl-tRNA synthetase [Homo sapiens] | gi\|31545 | 1843 | 3282 | 88 | 88 | HMVBW39 |
| | | >pir\|S17675\|S17675 valine--tRNA ligase (EC | | | | | | |
| | | 6.1.1.9) - human Length = 1265 | | | | | | |
| 142 | 779262 | | | 1 | 288 | | | HTENK29 |
| 143 | 779392 | | | 2 | 181 | | | HE2F087 |
| 144 | 780149 | proteasome activator hPA28 suunit beta | gnl\|PID\|d10088 | 233 | 955 | 93 | 93 | HSPMF83 |
| | | [Homo sapiens] >pir\|153518\|I53518 | 00 | | | | | |
| | | proteasome activator hPA28 suunit beta - | | | | | | |
| | | human >sp\|Q15129\|Q15129 PROTEASOME | | | | | | |
| | | ACTIVATOR HPA28 SUUNIT BETA. | | | | | | |
| | | >sp\|G693763\|G693763 | | | | | | |
| | | PA28 = REGULATORS OF THE 20 S | | | | | | |
| | | PROTEASOME {PEPTIDE 15}. {SUB | | | | | | |
| 145 | 780583 | | | 8 | 607 | | | HHEOW04 |
| 146 | 780960 | | | 232 | 576 | | | HOEBN65 |
| 147 | 781469 | radixin [Homo sapiens] >pir\|A46127\|A46127 | gi\|307366 | 1 | 303 | 100 | 100 | HNTRA25 |
| | | radixin - human Length = 583 | | | | | | |
| 148 | 781556 | | | 116 | 190 | | | HOSAW82 |
| 149 | 781771 | | | 1 | 822 | | | HE6EO05 |
| 150 | 782033 | histone H2A [Gallus gallus] Length = 129 | gi\|1493827 | 146 | 544 | 98 | 100 | HULCC66 |
| 151 | 782105 | | | 606 | 1064 | | | HKAKV16 |
| 152 | 782122 | high density lipoprotein binding protein | gi\|183892 | 3 | 983 | 95 | 95 | HSRAB32 |
| | | [Homo sapiens] >pir\|A44125\|A44125 high | | | | | | |
| | | density lipoprotein-binding protein, 110K - | | | | | | |
| | | human >sp\|Q00341\|HBP{HUMAN HIGH | | | | | | |
| | | DENSITY LIPOPROTEIN BINDING | | | | | | |
| | | PROTEIN (HDL-BINDING PROTEIN). | | | | | | |
| | | >sp\|G1478463\|G1478463 VIGILIN=KH | | | | | | |
| | | PROTEIN | | | | | | |
| 153 | 783135 | zinc finger protein [Homo sapiens] | gnl\|PID\|dl0212 | 3 | 500 | 97 | 99 | HCHCB61 |
| | | >sp\|O00488\|O00488 ZINC FINGER | 01 | | | | | |
| | | PROTEIN. Length = 116 | | | | | | |
| 154 | 783245 | | | 3 | 341 | | | HTSFV77 |
| 155 | 783247 | | | 95 | 391 | | | HBGMD18 |
| 156 | 783413 | D9 splice variant 3 [Mus musculus] | gi\|2071991 | 1 | 591 | 80 | 88 | HEBFR23 |
| | | >sp\|O08695\|O08695 D9 SPLICE VARIANT | | | | | | |
| | | 3. Length = 169 | | | | | | |
| 157 | 784407 | | | 45 | 185 | | | HEKAA09 |
| 158 | 784548 | nuclear RNA helicase (DEAD family) [Homo | gi\|587146 | 676 | 1020 | 90 | 92 | HSRFZ85 |
| | | sapiens] >pir\|I3720\|I37201 nuclear RNA | | | | | | |
| | | helicase (DEAD family) BAT1 - human | | | | | | |
| | | >sp\|Q13838\|HE47_HUMAN PROBABLE | | | | | | |
| | | ATP-DEPENDENT RNA HELICASE P47. | | | | | | |
| | | >gi\|2739119 (AE029061) BATL [Homo | | | | | | |
| | | sapiens] {SUB 145-428} >gi\|971677 express | | | | | | |
| 159 | 785075 | KIAA0100 is a human counterpart of mouse | gnl\|PID\|d10084 | 72 | 1109 | 93 | 93 | HDPFX40 |
| | | el gene. [Homo sapiens] >sp\|Q14667\|Q14667 | 77 | | | | | |
| | | KJAA0100 (HUMAN COUNTERPART OF | | | | | | |
| | | MOUSE E1 GENE). Length = 2092 | | | | | | |
| 160 | 785677 | (AC004084) similar to DNA-DIRECTED | gi\|2822158 | 1 | 273 | 95 | 100 | HBSAJ50 |
| | | RNA POLYMERASE 1113.3 KD | | | | | | |
| | | POLYPEPTIDE; 98% similar to P5243 | | | | | | |
| | | (PTD:g1710661) [Homo sapiens] | | | | | | |
| | | >sp\|O43375\|O43375 SIMILAR TO DNA- | | | | | | |
| | | DiRECTED RNA POLYMERASE 1113.3 | | | | | | |
| | | KD POLYPEPTIDE (FRAGMENT). Length = | | | | | | |
| | | 105 | | | | | | |
| 161 | 786238 | | | 2 | 994 | | | HOVCA75 |
| 162 | 786389 | | | 3 | 1124 | | | HLJDU61 |
| 163 | 786929 | (AJ224442) methyltransferase [Homo sapiens] | gnl\|PID\|e12534 | 123 | 404 | 86 | 95 | HOFNV27 |
| | | >sp\|O43709\|O43709 | 26 | | | | | |
| | | METHYLTRANSFERASE. Length = 220 | | | | | | |
| 164 | 786932 | PIPPin protein [Rattus norvegicus] | gi\|1050754 | 2 | 490 | 76 | 87 | HUSYH27 |
| | | >pir\|JC4588\|JC4588 RNA-binding protein | | | | | | |
| | | PIPPin - rat >sp\|Q63430\|Q63430 PIPPIN | | | | | | |
| | | PROTEIN. Length = 154 | | | | | | |
| 165 | 787078 | HER2 receptor [Homo sapiens] >gi\|553282 c- | gi\|306840 | 236 | 1114 | 79 | 79 | HCHND12 |
| | | erb-2 protein [Homo sapiens] {SUB 737- | | | | | | |
| | | 103} >gi\|553332 HER-2/neu [Homo sapiens] | | | | | | |
| | | {SUB 1-191} >gi\|183989 HER2 receptor (AA | | | | | | |
| | | at 3) [Homo sapiens] {SUB 740-910} | | | | | | |
| | | >gi\|182169 c-erb B2/neu protein [Homo | | | | | | |
| | | sapiens] {SUB 1081- | | | | | | |
| 166 | 787139 | | | 230 | 625 | | | HBCBA06 |
| 167 | 787283 | | | 3 | 656 | | | HFOYO96 |
| 168 | 788761 | MAL3P6.24 [Plasmodium falciparum] | gnl\|PID\|e13319 | 2 | 700 | 36 | 60 | HTXFK57 |
| | | >sp\|O77371\|O77371 MAL3P6.24 PROTEIN. | 09 | | | | | |
| | | Length = 1017 | | | | | | |
| 169 | 788988 | (AF023611) Dimip homolog [Homo sapiens] | gi\|2565275 | 70 | 417 | 98 | 98 | HUSGH90 |
| | | >sp\|O14834\|O14834 DIMIP HOMOLOG. | | | | | | |
| | | Length = 142 | | | | | | |
| 170 | 789092 | | | 2 | 400 | | | H6EBE80 |
| 171 | 789298 | (AF044311) ganima-synuclein [Homo | gi\|3347842 | 1 | 489 | 82 | 82 | HTSFM20 |
| | | sapiens] >gi\|3642775 (AF017256) persyn | | | | | | |
| | | [Homo sapiens] >gi\|3642903 (AF037207) | | | | | | |
| | | persyn [Homo sapiens] >sp\|O76070\|O76070 | | | | | | |
| | | PERSYN. Length = 127 | | | | | | |
| 172 | 789299 | | | 205 | 381 | | | HBGDD91 |
| 173 | 789718 | | | 233 | 580 | | | HBGBT30 |
| 174 | 789957 | beta-hexosaminidase alpha chain [Homo | gi\|179458 | 750 | 1619 | 99 | 99 | HISEM44 |
| | | sapiens] >pir\|A23561\|AOHUBA beta-N- | | | | | | |
| | | acetylhexosaminidase (EC 3.2.1.52) alpha | | | | | | |
| | | chain precursor - human | | | | | | |
| | | >sp\|06865\|HEXA_HUMAN BETA- | | | | | | |
| | | HEXOSAMINIDASE ALPHA CHAIN | | | | | | |
| | | PRECURSOR (EC 3.2.1.52) (N-ACETYL- | | | | | | |
| | | BETA-GLUCOSAMINIDASE) (BETA | | | | | | |
| 175 | 789977 | arginyl-tRNA synthetase, ArgRS [human, | bbs\|173838 | 25 | 2019 | 94 | 95 | HMEIU30 |
| | | ataxia-telangiectasia patients, EBV- | | | | | | |
| | | lymphoblastoid cells, Peptide, 659 aa] [Homo | | | | | | |
| | | sapiens] >pir\|JC4365\|JC4365 arginine--tRNA | | | | | | |
| | | ligase (EC 6.1.1.19) - human Length = 659 | | | | | | |
| 176 | 790285 | HCG V [Homo sapiens] >sp\|O6O927\|O60927 | gi\|3176438 | 44 | 391 | 85 | 85 | HDPCH88 |
| | | HCG V. Length = 126 | | | | | | |
| 177 | 790509 | human elongation factor-1-delta [Homo | gi\|38522 | 227 | 1108 | 63 | 64 | HPMGB64 |
| | | sapiens] >pir\|S34626\|S34626 translation | | | | | | |
| | | elongation factor eEF- 1 delta chain - human | | | | | | |
| | | >sp\|P29692\|EF1D_HUMAN ELONGATION | | | | | | |
| | | FACTOR 1-DELTA (EF-1-DELTA). Length = | | | | | | |
| | | 281 | | | | | | |
| 178 | 790775 | | | 950 | 1351 | | | HJAAO21 |
| 179 | 790888 | (AF036956) neuroblastoma apoptosis-related | gi\|4104559 | 2 | 274 | 100 | 100 | HE8QE19 |
| | | RNA binding protein [Homo sapiens] | | | | | | |
| | | >sp\|G4104559\|G4104559 | | | | | | |
| | | NEUROBLASTOMA APOPTOSIS- | | | | | | |
| | | RELATED RNA BINDING PROTEIN. | | | | | | |
| | | Length = 490 | | | | | | |
| 180 | 791506 | | | 2 | 205 | | | HOFMB93 |
| 181 | 791649 | | | 3 | 359 | | | HBGBH10 |
| 182 | 791802 | | | 165 | 695 | | | HWLRH03 |
| 183 | 792002 | ADP-ribosylation factor [Homo sapiens] | gi\|178987 | 2 | 655 | 100 | 100 | HHENT53 |
| | | >gi\|2088529 ADP-ribosylation factor 5 | | | | | | |
| | | [Homo sapiens] >gi\|438870 ADP-ribosylation | | | | | | |
| | | factor 5 [Rattus norvegicus] | | | | | | |
| | | >gnl\|PID\|d1014187 ARES [Mus musculus] | | | | | | |
| | | >pir\|A23741\|A23741 ADP-ribosylation factor | | | | | | |
| | | 5 - human >pir\|JC4949\|JC4 | | | | | | |
| 184 | 792291 | see GenBank Accession Number UGi 184 for | gi\|2138290 | 843 | 3329 | 96 | 96 | HDPIT69 |
| | | cDNA; similar to Drosophila melanogaster flu | | | | | | |
| | | in GenBank Accession Number U01182 and | | | | | | |
| | | Caenorhabditis elegans flu homolog in | | | | | | |
| | | GenBank Accession Number U01183 [Homo | | | | | | |
| | | sapiens] >sp\|Q13045\|Q13045 FLIGHTLESS-I | | | | | | |
| | | PROTEIN HOMOL | | | | | | |
| 185 | 792371 | | | 3 | 665 | | | HUSJW77 |
| 186 | 792660 | (AF044773) breakpoint cluster region protein | gi\|300295 | 1116 | 406 | 100 | 100 | HCHMC26 |
| | | 1 [Homo sapiens] >sp\|O60558\|O60558 | | | | | | |
| | | BREAKPOINT CLUSTER REGION | | | | | | |
| | | PROTEIN 1. Length = 138 | | | | | | |
| 187 | 792782 | | | 41 | 838 | | | HTXJB38 |
| 188 | 792890 | (AF001846) lymphoid phosphatase LyP1 | gi\|4100632 | 2 | 994 | 90 | 90 | HHESJ29 |
| | | [Homo sapiens] >sp\|G4100632\|G4100632 | | | | | | |
| | | LYMPHOID PHOSPHATASE LYP 1. Length = | | | | | | |
| | | 808 | | | | | | |
| 189 | 792931 | | | 1 | 576 | | | HEGAW71 |
| 190 | 792943 | myosin heavy chain kinase B [Dictyostelium | gi\|1903458 | 3 | 1247 | 43 | 68 | HDPRZ79 |
| | | discoideum]>sp\|P90648\|KMHB_DICDI | | | | | | |
| | | MYOSIN HEAVY CHAIN KINASE B (BC | | | | | | |
| | | 2.7.1.129) (MHCK B). Length = 732 | | | | | | |
| 191 | 793104 | | | 107 | 250 | | | HKGAJ80 |
| 192 | 793445 | desmoyokin - human (fragments) | pir\|A45259\|A45 | 1 | 723 | 92 | 92 | HDTEJ86 |
| | | >sp\|Q09666\|AHNK_HUMAN | 259 | | | | | |
| | | NEUROBLAST DIFFERENTIATION | | | | | | |
| | | ASSOCIATED PROTEIN AHNAK | | | | | | |
| | | (DESMOYOKIN) (FRAGMENTS). | | | | | | |
| | | >gi\|178281 AIINAK nucleoprotein [Homo | | | | | | |
| | | sapiens] {SUB 1-1683} >gi\|897824 AHNAK | | | | | | |
| | | gene product [Homo sapiens] {SUB 1684- | | | | | | |
| | | 2960} Leng | | | | | | |
| 193 | 793446 | | | 25 | 255 | | | HHBGY94 |
| 194 | 793639 | (AF044959)NADH:ubiquinone | gi\|3348137 | 1 | 411 | 100 | 100 | HLJBJ72 |
| | | oxidoreductase NDUES6 subunit [Homo | | | | | | |
| | | sapiens] >sp\|O7538O\|NUMM_HUMAN | | | | | | |
| | | NADH-UBIQUINONE | | | | | | |
| | | OXIDOREDUCTASE 13 KD-A SUBUNIT | | | | | | |
| | | PRECURSOR (EC 1.6.5.3) (EC 1.6.99.3) | | | | | | |
| | | (COMPLEX I-13KD-A) (CI-13KD-A). | | | | | | |
| | | Length = 124 | | | | | | |
| 195 | 794213 | 100 kDa protein [Rattus norvegicus] | gi\|55535 | 326 | 691 | 93 | 95 | HLWCN67 |
| | | >pir\|522659\|522659 hypothetical protein, | | | | | | |
| | | 100K - rat >sp\|Q62671\|100K_RAT 100 KD | | | | | | |
| | | PROTEIN (EC 6.3.2.-). Length = 889 | | | | | | |
| 196 | 795858 | | | 1020 | 1205 | | | HLYDY53 |
| 197 | 795955 | c-myc binding protein [Homo sapiens] | gnl\|PID\|d10147 | 31 | 507 | 100 | 100 | HUSXX36 |
| | | >sp\|Q99471\|MM1_HUMAN C-MYC | 06 | | | | | |
| | | BINDING PROTETN MM-1. | | | | | | |
| | | >sp\|D1014706\|D1014706 C-MYC BINDING | | | | | | |
| | | PROTEIN. Length = 167 | | | | | | |
| 198 | 796359 | ribosomal protein L7a large subunit [Homo | gi\|337495 | 19 | 297 | 100 | 100 | HOFNW79 |
| | | sapiens] >gi\|34203 L7a protein [Homo | | | | | | |
| | | sapiens] >gi\|35512 PLA-X polypeptide | | | | | | |
| | | [Homo sapiens] >gi\|36647 ribosomal protein | | | | | | |
| | | L7a [Homo sapiens] >gi\|56956 ribosomal | | | | | | |
| | | protein L7a (AA 1-266) [Rattus rattus] | | | | | | |
| | | >pir\|S19717∩R5HU7A | | | | | | |
| 199 | 796555 | DJ366N23.3 (KIAA0173 AND TUBULIN- | sp\|O756S3\|O75 | 1 | 1086 | 44 | 62 | HLWEW04 |
| | | TYROSINE L\|GASE LIKE) (FRAGMENT). | 653 | | | | | |
| | | Length = 278 | | | | | | |
| 200 | 796675 | PEG1/MEST [Homo sapiens] | gnl\|PID\|e30703 | 44 | 1027 | 100 | 100 | HSICR25 |
| | | >sp\|O15007\|O15007 PEG1/MEST GENE | 7 | | | | | |
| | | MRNA. Length = 335 | | | | | | |
| 201 | 796743 | (AF022229) translation initiation factor 6 | gi\|2809383 | 30 | 842 | 100 | 100 | H6EDU12 |
| | | [Homo sapiens] >gnl\|PID\|e304603 b4 integrin | | | | | | |
| | | interactor [Homo sapiens] >gi\|3335506 | | | | | | |
| | | (AF047433) b(2)gcn homolog [Homo sapiens] | | | | | | |
| | | >sp\|P56537\|IF6_HUMAN EUKARYOTIC | | | | | | |
| | | TRANSLATION INITIATION FACTOR 6 | | | | | | |
| | | (ETF-6) (B4 INTEGRIN INT | | | | | | |
| 202 | 796792 | | | 198 | 461 | | | HDTII72 |
| 203 | 799668 | | | 166 | 303 | | | HODBC01 |
| 204 | 799669 | | | 2 | 310 | | | HOGAV29 |
| 205 | 799673 | | | 2 | 310 | | | HOFMN53 |
| 206 | 799674 | | | 130 | 1044 | | | HCHMI60 |
| 207 | 799678 | ribosomal protein Ll8a [Homo sapiens] | gi\|401845 | 40 | 345 | 98 | 98 | HOFNL25 |
| | | >gi\|3702270 (AC005796) ribosomal protein | | | | | | |
| | | Li 8a [Homo sapiens] >gnl\|PID\|d1029536 | | | | | | |
| | | (AB007 175) ribosomal protein L18a [Homo | | | | | | |
| | | sapiens] {SUB 111-176} Length= 176 | | | | | | |
| 208 | 799728 | | | 3 | 179 | | | HBGBG75 |
| 209 | 799748 | | | 1 | 660 | | | HCHMQ24 |
| 210 | 799760 | o361 [Escherichia coli] >gi\|1790125 | gi\|290539 | 1 | 357 | 99 | 100 | HBGBF66 |
| | | (AE000446) off, hypothetical protein | | | | | | |
| | | [Escherichia coli] >pir\|C65171\|C65171 | | | | | | |
| | | hypothetical 41.0 kD protein in ibpA-gyrB | | | | | | |
| | | intergenic region - Escherichia coli (strain K- | | | | | | |
| | | 12) Length = 361 | | | | | | |
| 211 | 799805 | | | 2 | 118 | | | HBGDA22 |
| 212 | 800296 | CDC37 homolog [Homo sapiens] | gi\|1421821 | 2 | 802 | 89 | 89 | HDABE68 |
| | | >gi\|1375485 CDC37 homolog [Homo | | | | | | |
| | | sapiens] >pir\|G02313\|G02313 CDC37 | | | | | | |
| | | homolog - human >sp\|Q16543\|Q16543 | | | | | | |
| | | CDC37 HOMOLOG. Length = 378 | | | | | | |
| 213 | 800327 | ADP-ribosylation factor-like protein 2 [Homo | gi\|3009501 | 25 | 645 | 99 | 99 | HCHPG41 |
| | | sapiens] >pir\|A48259\|A48259 ADP- | | | | | | |
| | | ribosylation factor-like 2 - human | | | | | | |
| | | >sp\|P36404\|ARL2_HUMAN ADP- | | | | | | |
| | | RIBOSYLATION FACTOR-LIKE PROTEIN | | | | | | |
| | | 2. >sp\|G425655\|G425655 ARL2 = ADP- | | | | | | |
| | | RIBOSYLATION FACTOR HOMOLOG. | | | | | | |
| | | Length = 184 | | | | | | |
| 214 | 800816 | | | 115 | 351 | | | HODCV09 |
| 215 | 800835 | (AF071538) Ets transcription factor PDEF | gi\|4007418 | 3 | 881 | 96 | 96 | HETJP29 |
| | | [Homo sapiens] >sp\|G4007418\|G4007418 | | | | | | |
| | | ETS TRANSCRIPTION FACTOR PDEF. | | | | | | |
| | | Length = 335 | | | | | | |
| 216 | 805429 | RanGAP1 [Homo sapiens] | gi\|575268 | 3 | 683 | 90 | 90 | HKABS06 |
| | | >pir\|JC5300\|JC5300 Ran GTPase activator 1- | | | | | | |
| | | human Length = 587 | | | | | | |
| 217 | 805458 | (AF044221) HCG-1 protein [Homo sapiens] | gi\|4105252 | 745 | 1122 | 100 | 100 | HDQEV55 |
| | | >sp\|G4105252\|G4105252 HCG-1 PROTEIN. | | | | | | |
| | | Length= 117 | | | | | | |
| 218 | 805478 | | | 60 | 644 | | | HDQGR35 |
| 219 | 805805 | 19 kDa subunit of NADH:ubiquinone | gi\|599681 | 2 | 478 | 87 | 90 | HOFMH12 |
| | | oxidoreductase complex (complex I) [Bos | | | | | | |
| | | taurus] >pir\|S16208\|S16208 NADH | | | | | | |
| | | dehydrogenase (ubiquinone) (EC 1.6.5.3)19K | | | | | | |
| | | chain - bovine >sp\|P42029\|NUPM_BOVIN | | | | | | |
| | | NADH-UBIQUINONE | | | | | | |
| | | OXIDOREDUCTASE 19 KD SUBUNIT (EC | | | | | | |
| | | 1.6.5.3) (EC 1.6.99 | | | | | | |
| 220 | 806486 | | | 3 | 62 | | | HFXJC33 |
| 221 | 806498 | | | 518 | 1741 | | | HIBCA25 |
| 222 | 806819 | acidic ribosomal phosphoprotein (P0) [Homo | gi\|190232 | 3 | 866 | 81 | 84 | HOFAC09 |
| | | sapiens] >gi\|2935618 (AC004263) 60S | | | | | | |
| | | ACIDIC RIBOSOMAL PROTEIN; match to | | | | | | |
| | | P05388 (PID:g133041) [Homo sapiens] | | | | | | |
| | | >pir\|A27125\|R51HUP0 acidic ribosomal | | | | | | |
| | | protein PG - human >sp\|D1026785\|D1026785 | | | | | | |
| | | RIBOSOMAL PROTEIN P0 (FRAGME | | | | | | |
| 223 | 810870 | thrombospondin-4 [Homo sapiens] | gi\|311626 | 2 | 1333 | 99 | 99 | HBOEB83 |
| | | >pir\|A55710\|TSHUP4 thrombospondin 4 | | | | | | |
| | | precursor - human Length = 961 | | | | | | |
| 224 | 811730 | | | 2 | 979 | | | HCHPJ26 |
| 225 | 813025 | heat shock protein 86 [Homo sapiens] | gi\|292162 | 106 | 492 | 88 | 89 | HOFMD78 |
| | | >sp\|Q14568\|Q14568 HEAT SHOCK | | | | | | |
| | | PROTEIN 86 (FRAGMENT). Length = 312 | | | | | | |
| 226 | 813233 | co-beta glucosidase precursor [Homo sapiens] | gi\|183231 | 1 | 468 | 81 | 90 | HOFMF17 |
| | | >gi\|337762 prosaposin [Homo sapiens] | | | | | | |
| | | >gi\|337756 sphingolipid activator precursor | | | | | | |
| | | [Homo sapiens] Length = 524 | | | | | | |
| 227 | 813262 | | | 1 | 345 | | | HFKCA89 |
| 228 | 815637 | (AC004003) serine/threonine kinase RICK; | gi\|3264574 | 3 | 461 | 92 | 92 | HNHDS66 |
| | | match to protein AF027706 (PID:g3123887) | | | | | | |
| | | and mRNA AF027706 (NID:g3123886) | | | | | | |
| | | [Homo sapiens] >gi\|3290172 (AE064824) | | | | | | |
| | | CARD-containing ICE associated kinase | | | | | | |
| | | [Homo sapiens] >gi\|3342910 (AF078530) | | | | | | |
| | | receptor interacting prote | | | | | | |
| 229 | 815853 | calcyphosine [Homo sapiens] >gi\|3075376 | gnl\|PID\|e24587 | 8 | 667 | 100 | 100 | HLHAY85 |
| | | (AC004602) CAYP_HUMAN; RD25 [Homo | 2 | | | | | |
| | | sapiens] >sp\|Q13938\|CAYP_HUMAN | | | | | | |
| | | CALCYPHOSINE. Length = 189 | | | | | | |
| 230 | 815999 | 5100 calcium-binding protein A13 (S100A13) | gnl\|PID\|e26825 | 68 | 421 | 42 | 70 | HKABX07 |
| | | [Homo sapiens] >pir\|JC5064\|JC5064 S-100 | 3 | | | | | |
| | | calcium-binding protein A13 - human Length = | | | | | | |
| | | 98 | | | | | | |
| 231 | 823427 | | | 1 | 927 | | | HTLGL50 |
| 232 | 823704 | (AC004770) BC269730_2 [Homo sapiens] | gi\|3169158 | 3 | 860 | 67 | 80 | HDABC49 |
| | | >sp\|O60427\|O60427 BC269730_2. Length = | | | | | | |
| | | 444 | | | | | | |
| 233 | 824798 | | | 307 | 858 | | | HDQGK75 |
| 234 | 825018 | | | 2 | 1924 | | | HETIS29 |
| 235 | 825076 | Whole ORF continues from bpl9 (right after | gnl\|PID\|d10040 | 2 | 1549 | 92 | 92 | HE9PJ48 |
| | | \|tagr) to bp1596 (‘tga’).; similar to chinese | 31 | | | | | |
| | | hamster phosphatidylserine synthase. [Homo | | | | | | |
| | | sapiens] Length = 473 | | | | | | |
| 236 | 825787 | EXT2 [Homo sapiens] >gi\|1621113 hereditary | gi\|1518042 | 305 | 2293 | 100 | 100 | HEONV84 |
| | | multiple exostoses gene 2 protein [Homo | | | | | | |
| | | sapiens] >gi\|519605 multiple exostosis 2 | | | | | | |
| | | [Homo sapiens] >sp\|Q93063\|EXT2\|HUMAN | | | | | | |
| | | EXOSTOSLN-2 (PUTATIVE TUMOUR | | | | | | |
| | | SUPPRESSOR PROTEIN EXT2) | | | | | | |
| | | (MULTIPLE EXOSTOSES PROTEIN 2). | | | | | | |
| | | Length | | | | | | |
| 237 | 826116 | BETA CRYSTALLIN S (GAMMA | sp\|P22914\|CRB | 392 | 682 | 86 | 87 | HAJAE27 |
| | | CRYSTALLIN S). >gi\|557548 crystallin | S_HUMAN | | | | | |
| | | [Homo sapiens] {SUB 19-106} Length = 177 | | | | | | |
| 238 | 826147 | neural specific protein CRMP-2 [Bos taurus] | gi\|1916227 | 3 | 503 | 98 | 98 | HCEPT06 |
| | | >sp\|O02675\|DPY2_BOVIN | | | | | | |
| | | DIHYDROPYRIMIDINASE RELATED | | | | | | |
| | | PROTEIN-2 (DRP-2) (NEURAL SPECIFIC | | | | | | |
| | | PROTEIN NSP60). Length = 572 | | | | | | |
| 239 | 827020 | (AF027954) Bcl-2-related ovarian killer | gi\|2645560 | 12 | 539 | 95 | 97 | HHFHE17 |
| | | protein [Rattus norvegicus] >gi\|2689660 | | | | | | |
| | | (AF027707) apoptosis activator Mtd [Mus | | | | | | |
| | | musculus] >sp\|O35425\|O35425 BCL-2- | | | | | | |
| | | RELATED OVARIAN KILLER PROTEIN. | | | | | | |
| | | Length = 213 | | | | | | |
| 240 | 827586 | calmodulin [Plasmodium falciparum] | gi\|385234 | 85 | 495 | 49 | 76 | HCHMW40 |
| | | >gi\|160128 calmodulin [Plasmodium | | | | | | |
| | | falciparum]>pir\|B45594\|MCZQF calmodulin - | | | | | | |
| | | Plasmodium falciparum | | | | | | |
| | | >sp\|P24044\|CALM_PLAFA CALMODULIN. | | | | | | |
| | | Length = 149 | | | | | | |
| 241 | 827732 | alternate name ygiG; ORF_f123 [Escherichia | gi\|882580 | 181 | 282 | 91 | 95 | HBGDE81 |
| | | coli] >gi\|1789438 (AE000387) putative kinase | | | | | | |
| | | [Escherichia coli] >pir\|H65093\|H65093 ygiG | | | | | | |
| | | protein - Escherichia coli (strain K- 12) | | | | | | |
| | | >sp\|P31055\|FOLB_ECOLI PROBABLE | | | | | | |
| | | DHYDRONEOPTER1N ALDOLASE (EC | | | | | | |
| | | 4.1.2.25) (DHNA). {SUB | | | | | | |
| 242 | 827735 | | | 541 | 708 | | | HHEDU22 |
| 243 | 827740 | | | 716 | 838 | | | HBNAP17 |
| 244 | 827808 | | | 86 | 1657 | | | HMELR44 |
| 245 | 828251 | (AB016869) p70 ribosomal 56 kinase beta | gnl\|PID\|d10353 | 134 | 949 | 91 | 91 | HNGOL64 |
| | | [Homo sapiens] >sp\|D1035383\|D1035383P70 | 83 | | | | | |
| | | RIBOSOMAL S6 KINASE BETA. Length = | | | | | | |
| | | 495 | | | | | | |
| 246 | 828357 | | | 1 | 768 | | | HKIYP61 |
| 247 | 828449 | | | 1 | 723 | | | HBXCZ22 |
| 248 | 828612 | syntaxin 5 [Homo sapiens] | gi\|886071 | 68 | 460 | 100 | 100 | HNHMY58 |
| | | >pir\|G01817\|G01817 syntaxin 5 - human | | | | | | |
| | | Length = 301 | | | | | | |
| 249 | 828647 | laminin beta 2 chain [Homo sapiens] | gnl\|PID\|e21328 | 299 | 2254 | 85 | 85 | HRABB47 |
| | | >sp\|P55268\|LMB2_HUMAN LAMININ | 6 | | | | | |
| | | BETA-2 CHAIN PRECURSOR (S- | | | | | | |
| | | LAMININ). Length = 1798 | | | | | | |
| 250 | 828698 | galactokinase [Homo sapiens] >gi\|1929895 | gi\|1002507 | 3 | 1220 | 83 | 83 | HKGAU37 |
| | | galactokinase [Homo sapiens] | | | | | | |
| | | >sp\|P51570\|GAL1_HUMAN | | | | | | |
| | | GALACTOKINASE 1 (EC 2.7.1.6). | | | | | | |
| | | >gi\|3603423 (AF084935) galactokinase | | | | | | |
| | | [Homo sapiens] {SUB 1-264} Length = 392 | | | | | | |
| 251 | 828962 | secretory protein [Homo sapiens] >gi\|940946 | gi\|402483 | 2 | 259 | 78 | 78 | HCHMR52 |
| | | intestinal trefoil factor [Homo sapiens] | | | | | | |
| | | >pir\|A48284\|A48284 intestinal trefoil factor 3 | | | | | | |
| | | precursor - human >sp\|Q07654\|TF_HUMAN | | | | | | |
| | | INTESTINAL TREFOIL FACTOR | | | | | | |
| | | PRECURSOR (HP1.B). Length = 80 | | | | | | |
| 252 | 828982 | unnamed protein product [unidentified] | gnl\|PID\|e12596 | 1 | 1176 | 85 | 85 | HE9PC52 |
| | | >gi\|189500 p62 [Homo sapiens] | 22 | | | | | |
| | | >pir\|A38219\|A38219 GAP-associated tyrosine | | | | | | |
| | | phosphoprotein p62 - human | | | | | | |
| | | >sp\|Q07666\|Q07666 GAP-ASSOCIATED | | | | | | |
| | | TYROSINE PHOSPHOPROTEIN P62. | | | | | | |
| | | >gnl\|PID\|e1259626 unnamed protein product | | | | | | |
| | | [unidentifie | | | | | | |
| 253 | 829282 | | | 289 | 828 | | | HCHOB95 |
| 254 | 829368 | | | 279 | 512 | | | HWGAA79 |
| 255 | 829751 | | | 2 | 418 | | | HCHMB33 |
| 256 | 829773 | (AF109906) G9A [Mus musculus] | gi\|3986768 | 26 | 862 | 97 | 98 | HMWBV67 |
| | | >sp\|G3986768\|G3986768 G9A. Length = | | | | | | |
| | | 1000 | | | | | | |
| 257 | 829934 | precursor polypeptide (AA -21 to 782) [Homo | gi\|37261 | 1142 | 2356 | 94 | 94 | HFIIJ68 |
| | | sapiens] >pir\|A35954\|A35954 endoplasmin | | | | | | |
| | | precursor - human | | | | | | |
| | | >sp\|P14625\|ENPL_HUMAN | | | | | | |
| | | ENDOPLASMIN PRECURSOR (94 KD | | | | | | |
| | | GLUCOSE-REGULATED PROTEIN) | | | | | | |
| | | (GRP94) (GP96 HOMOLOG) (TUMOR | | | | | | |
| | | REJECTION ANT\|GEN 1). Length = 803 | | | | | | |
| 258 | 829942 | dynamitin [Homo sapiens] | gi\|1255188 | 15 | 1409 | 85 | 85 | HUFBF69 |
| | | >sp\|Q13S61\|DYNC_HUMAN DYNACTIN, | | | | | | |
| | | 50 KD ISOFORM (50 KD DYNEIN- | | | | | | |
| | | ASSOCIATED POLYPEPTIDE) | | | | | | |
| | | (DYNAMITIN). Length = 406 | | | | | | |
| 259 | 829951 | | | 119 | 262 | | | HBGBA32 |
| 260 | 830173 | death associated protein 5 [Homo sapiens] | gnl\|PID\|e12988 | 51 | 2870 | 90 | 90 | HETJX39 |
| | | >sp\|O60877\|O60877 DEATH ASSOCIATED | 88 | | | | | |
| | | PROTEIN 5. Length = 907 | | | | | | |
| 261 | 830200 | | | 3 | 638 | | | HBGMF83 |
| 262 | 830365 | mevalonate pyrophosphate decarboxylase | gi\|1235682 | 56 | 1291 | 95 | 95 | HUSJG21 |
| | | [Homo sapiens] >sp\|P53602\|ER19\|HUMAN | | | | | | |
| | | DIPHOSPHOMEVALONATE | | | | | | |
| | | DECARBOXYLASE (BC 4.1.1.33) | | | | | | |
| | | (MEVALONATE PYROPHOSPHATE | | | | | | |
| | | DECARBOXYLASE). Length = 400 | | | | | | |
| 263 | 830456 | | | 215 | 397 | | | HCFBN01 |
| 264 | 830549 | guanine nucleotide-binding regulatory protein- | gi\|386751 | 1 | 729 | 100 | 100 | HDPXM12 |
| | | beta-2 subunit [Homo sapiens] >gi\|339935 | | | | | | |
| | | transducin beta-2 subunit [Homo sapiens] | | | | | | |
| | | >gi\|3135310 (AE053356) GNB2 [Homo | | | | | | |
| | | sapiens] >pir\|B26617\|RGHUB2 GTP-binding | | | | | | |
| | | regulatory protein beta-2 chain - human | | | | | | |
| | | >sp\|P11016\|GB | | | | | | |
| 265 | 830602 | | | 24 | 461 | | | HTLDJ82 |
| 266 | 830610 | zyxin [Homo sapiens] >gnl\|PID\|e223417 | gnl\|PID\|e21826 | 956 | 1855 | 94 | 94 | HDPRN35 |
| | | zyxin [Homo sapiens] >pir\|G02845\|G02845 | 0 | | | | | |
| | | zyxin - human Length = 572 | | | | | | |
| 267 | 830644 | (AF104260) hiwi [Homo sapiens] | gi\|4038413 | 2 | 391 | 99 | 99 | HTEEU95 |
| | | >sp\|G4038413\|G4038413 HIWI | | | | | | |
| | | (FRAGMENT). Length = 523 | | | | | | |
| 268 | 830707 | | | 3 | 623 | | | HETCJ14 |
| 269 | 830709 | | | 2 | 304 | | | HSSGN20 |
| 270 | 830733 | | | 540 | 725 | | | HSNAD86 |
| 271 | 830768 | carboxylesterase hCE-2 [Homo sapiens] | gi\|1407780 | 623 | 2269 | 99 | 99 | HDPFX44 |
| | | >sp\|Q16859\|Q16859 | | | | | | |
| | | CARBOXYLESTERASE (EC 3.1.1.1) (ALI- | | | | | | |
| | | ESTERASE) (B-ESTERASE) | | | | | | |
| | | (MONOBUTYRASE) (COCAINE | | | | | | |
| | | ESTERASE) (PROCAINE ESTERASE) | | | | | | |
| | | (METHYLBUTYRASE). Length = 550 | | | | | | |
| 272 | 830855 | | | 1 | 465 | | | HJPCE06 |
| 273 | 830949 | | | 2457 | 2903 | | | HCE5J35 |
| 274 | 830965 | | | 139 | 792 | | | HOHCA01 |
| 275 | 830973 | | | 354 | 557 | | | HRODL42 |
| 276 | 830979 | THIOREDOXIN REDUCTASE 2. Length = | sp\|G3757888\|G | 753 | 1454 | 81 | 90 | HOGCC93 |
| | | 526 | 3757888 | | | | | |
| 277 | 830989 | La protein [Homo sapiens] >gi\|36415 | gi\|178687 | 3 | 1382 | 87 | 87 | HDQFZ49 |
| | | ribonucleoprotein SS-B/La (AA 1-408) | | | | | | |
| | | [Homo sapiens] >pir\|A31888\|A31888 | | | | | | |
| | | ribonucleoprotein La - human | | | | | | |
| | | >sp\|PO5455\|LA_HUMAN LUPUS LA | | | | | | |
| | | PROTEN (SJOGREN SYNDROME TYPE B | | | | | | |
| | | ANTIGEN (SS-B)) (LA | | | | | | |
| | | RIBONUCLEOPROTETN) (LA | | | | | | |
| | | AUTOANTIGEN). | | | | | | |
| 278 | 831134 | | | 2 | 241 | | | HBXEB46 |
| 279 | 831200 | | | 3 | 773 | | | HADXB20 |
| 280 | 831260 | | | 892 | 1095 | | | HLWBR58 |
| 281 | 831531 | transcription factor [Homo sapiens] >gi\|37058 | gi\|339490 | 93 | 1172 | 95 | 95 | HHPGX85 |
| | | IIB protein [Homo sapiens] | | | | | | |
| | | >pir\|S17654\|TWHU2B transcription initiation | | | | | | |
| | | factor IIB - human >bbs\|112738 S300-II, | | | | | | |
| | | TFIIB = transcription factor [human, Peptide | | | | | | |
| | | Partial, 311 aa] [Homo sapiens] {SUB 6-316} | | | | | | |
| | | Length = 31 | | | | | | |
| 282 | 831665 | | | 2 | 1093 | | | HSKDH81 |
| 283 | 831724 | | | 1 | 468 | | | HFEBQ94 |
| 284 | 831884 | (AF034800) liprin-alpha3 [Homo sapiens] | gi\|3309535 | 20 | 469 | 90 | 90 | HDTGO74 |
| | | >sp\|G3309535\|G3309535 LIPRIN-ALPHA3 | | | | | | |
| | | (FRAGMENT). Length = 443 | | | | | | |
| 285 | 831897 | laminin B1 [Homo sapiens] >gi\|186876 | gi\|186837 | 1 | 1581 | 92 | 92 | HSKHV84 |
| | | laminin B1 [Homo sapiens] >gi\|186913 | | | | | | |
| | | laminin B1 [Homo sapiens] | | | | | | |
| | | >pir\|S13547\|MMHUB1 laminin chain B1 | | | | | | |
| | | precursor - human | | | | | | |
| | | >sp\|PO7942\|LMB1_HUMAN LAMININ | | | | | | |
| | | BETA-1 CHAIN PRECURSOR (LAMININ | | | | | | |
| | | B1 CHAIN). Length = 1786 | | | | | | |
| 286 | 831922 | | | 499 | 684 | | | HDQTB68 |
| 287 | 831963 | | | 188 | 319 | | | HDPGS84 |
| 288 | 832074 | gluconate kinase [Escherichia coli] | gi\|537110 | 1 | 579 | 42 | 58 | HCRNT71 |
| | | >gi\|1790719 (AE000497) gluconate kinase, | | | | | | |
| | | thermosensitive glucokinase [Escherichia coli] | | | | | | |
| | | >pir\|S56494\|S56494 gluconokinase (EC | | | | | | |
| | | 2.7.1.12) gntV - Escherichia coli | | | | | | |
| | | >sp\|P39208\|GNTV_ECOLI | | | | | | |
| | | THERMOSENSITIVE GLUCONOKINASE | | | | | | |
| | | (BC 2.7. | | | | | | |
| 289 | 832266 | | | 71 | 433 | | | HNGJU70 |
| 290 | 832309 | | | 1891 | 2226 | | | HBJDT21 |
| 291 | 832342 | fatty acid amide hydrolase [Homo sapiens] | gi\|2 149156 | 9 | 224 | 97 | 100 | HBGDP82 |
| | | >sp\|O00S19\|O000519 FATTY ACID AMIDE | | | | | | |
| | | HYDROLASE. Length = 579 | | | | | | |
| 292 | 832351 | unknown product specific to adipose tissue | gnl\|PID\|d10088 | 47 | 298 | 68 | 68 | HFABE30 |
| | | [Homo sapiens] >sp\|Q15847\|Q15847 | 21 | | | | | |
| | | HYPOTHETICAL 7.9 KD PROTEIN. Length = | | | | | | |
| | | 76 | | | | | | |
| 293 | 832352 | unknown product specific to adipose tissue | gnl\|PID\|d10088 | 89 | 277 | 92 | 94 | HOEKX93 |
| | | [Homo sapiens] >sp\|Q15847\|Q15847 | 21 | | | | | |
| | | HYPOTHETICAL 7.9 KD PROTEIN. Length = | | | | | | |
| | | 76 | | | | | | |
| 294 | 832434 | Cks1 protein homologue [Homo sapiens] | gi\|29977 | 78 | 335 | 100 | 100 | HFNAB43 |
| | | >pir\|A36670\|A36670 protein kinase cdc2 | | | | | | |
| | | complex subunit CKS1-human | | | | | | |
| | | >sp\|P33551\|CKS1_HUMAN CYCLIN- | | | | | | |
| | | DEPENDENT KINASES REGULATORY | | | | | | |
| | | SUBUNIT 1 (CKS-1). Length = 79 | | | | | | |
| 295 | 832490 | growth arrest and DNA-damage-inducible | gi\|182940 | 220 | 798 | 98 | 100 | HKAKL21 |
| | | protein [Homo sapiens] >gi\|403128 [Human | | | | | | |
| | | gadd45 gene, complete cds.], gene product | | | | | | |
| | | [Homo sapiens] >pir\|A39617\|A39617 DNA- | | | | | | |
| | | damage-inducible protein gadd4s - human | | | | | | |
| | | >sp\|P24522\|GA45_HUMAN GROWTH | | | | | | |
| | | ARREST AND DNA-DAMAGE-INDU | | | | | | |
| 296 | 832573 | | | 30 | 629 | | | HCHOY13 |
| 297 | 832580 | p82 protein [Homo sapiens] >gi\|35707 pS2 | gi\|35718 | 45 | 362 | 100 | 100 | H2LAR67 |
| | | precursor [Homo sapiens] >gnl\|PID\|e223341 | | | | | | |
| | | pS2 [Homo sapiens] >pir\|A26667\|A26667 pS2 | | | | | | |
| | | protein precursor - human >gi\|182204 | | | | | | |
| | | estrogen receptor [Homo sapiens] {SUB 2- | | | | | | |
| | | 84} Length = 84 | | | | | | |
| 298 | 833394 | | | 274 | 588 | | | HBGMC47 |
| 299 | 835355 | (AF060567) sushi-repeat protein [Homo | gi\|3108089 | 3 | 1295 | 99 | 100 | HUSAU05 |
| | | sapiens] >sp\|O60687\|O60687 SUSHI- | | | | | | |
| | | REPEAT PROTEIN. Length = 465 | | | | | | |
| 300 | 835497 | (AJ006064) coronin-like protein [Rattus | gnl\|PID\|e13317 | 334 | 1584 | 96 | 99 | HLDDS71 |
| | | norvegicus] >sp\|O89046\|O89046 CORONIN- | 90 | | | | | |
| | | LIKE PROTEIN. Length = 484 | | | | | | |
| 301 | 835728 | | | 2 | 871 | | | HODAK21 |
| 302 | 835978 | | | 643 | 2019 | | | HTLEB03 |
| 303 | 836091 | PDC-E2 precursor (AA -54 to 561) [Homo | gi\|35360 | 546 | 2114 | 99 | 99 | H2CBW86 |
| | | sapiens] >pir\|SO1783\|XXHU | | | | | | |
| | | dihydrolipoamide S-acetyltransferase (EC | | | | | | |
| | | 2.3.1.12) precursor - human (fragment) | | | | | | |
| | | >gi\|345030 Human 70kd mitochondrial | | | | | | |
| | | antigen of PBC [unidentified] {SUB 179-500} | | | | | | |
| | | >sp\|G254062\|G254062 PYRUVATE D | | | | | | |
| 304 | 836274 | Id4 [Homo sapiens] >gnl\|P1D\|e266418 helix- | gi\|881546 | 2 | 334 | 98 | 98 | HCLBP52 |
| | | loop-helix protein [Homo sapiens] | | | | | | |
| | | >gnl\|PID\|e1359205 (AL022726) dJ625H18.1 | | | | | | |
| | | (ID4 Helix-loop-helix DNA binding protein) | | | | | | |
| | | [Homo sapiens] >gnl\|PID\|e266418 helix-loop- | | | | | | |
| | | helix protein [Homo sapiens] | | | | | | |
| | | >pir\|G01855\|G01855 Id4 - | | | | | | |
| 305 | 836731 | (AF075599) ubiquitin conjugating enzyme 12 | gi\|3309661 | 2 | 571 | 100 | 100 | HEXAZ01 |
| | | [Homo sapiens] >gnl\|PID\|d1034111 | | | | | | |
| | | (AB012191) Nedd8-conjugating enzyme | | | | | | |
| | | hUbcl2 [Homo sapiens] >sp\|O76069\|O76069 | | | | | | |
| | | UBIQUITIN-CONJUGATING ENZYME E2 | | | | | | |
| | | (BC 6.3.2.19) (UBIQUITIN-PROTEIN | | | | | | |
| | | LIGASE) (UBIQUITIN CARRIER | | | | | | |
| | | PROTEIN). L | | | | | | |
| 306 | 838014 | prolyl 4-hydroxylase alpha (II) subunit [Homo | gi\|2439985 | 3 | 1574 | 99 | 99 | HTEHY24 |
| | | sapiens] >sp\|O15460\|O15460 PROLYL 4- | | | | | | |
| | | HYDROXYLASE ALPHA (II) SUBUNIT | | | | | | |
| | | (II). Length = 535 | | | | | | |
| 307 | 838874 | | | 271 | 546 | | | HFPEZ63 |
| 308 | 839120 | peptide transporter [Homo sapiens] | gi\|36061 | 100 | 2169 | 90 | 90 | HNEDY03 |
| | | >pir\|S13427\|A41538 ATP-binding cassette | | | | | | |
| | | transporter TAP1 - human >gi\|34636 ABC- | | | | | | |
| | | transporter [Homo sapiens] {SUB 61-808} | | | | | | |
| | | >gi\|930122 Y3 gene product [Homo sapiens] | | | | | | |
| | | {SUB 183-612} Length= 808 | | | | | | |
| 309 | 839611 | | | 548 | 793 | | | HAMFI54 |
| 310 | 840138 | start position 1 [Homo sapiens] | gnl\|PID\|e13353 | 1 | 1800 | 92 | 93 | HFIHW86 |
| | | >sp\|E1335356\|E1335356 ASMTL PROTEIN | 56 | | | | | |
| | | >gnl\|PID\|e1335357 start position 2 [Homo | | | | | | |
| | | sapiens] {SUB 59-629} Length = 629 | | | | | | |
| 311 | 840616 | Homology with Squid retinal-binding protein | gnl\|PID\|e13493 | 3 | 1607 | 73 | 86 | HMSCY51 |
| | | (PR Ace. No. A53057) [Caenorhabditis | 97 | | | | | |
| | | elegans] >sp\|Q22467\|Q22467 T13H5.2 | | | | | | |
| | | PROTEIN. Length = 1254 | | | | | | |
| 312 | 840780 | unknown [Saccharomyces cerevisiae] | gi\|763343 | 17 | 880 | 57 | 80 | H6EDY61 |
| | | >pir\|558704\|S58704 probable membrane | | | | | | |
| | | protein YIL003w - yeast (Saccharomyces | | | | | | |
| | | cerevisiae) >gi\|558401 incomplete orf, len: | | | | | | |
| | | 160, CAI: 0.09 similar to MRP_ECOLI | | | | | | |
| | | P21590 39.9 KD PROTEIN [Saccharomyces | | | | | | |
| | | [cerevisiae] {SUB 1-158} >g | | | | | | |
| 313 | 840857 | (AF071059) zinc finger RNA binding protein | gi\|3293537 | 459 | 2669 | 94 | 94 | HLHDQ83 |
| | | [Mus musculus] >sp\|O88532\|O88532 ZINC | | | | | | |
| | | FINGER RNA BINDING PROTEIN. | | | | | | |
| | | Length = 1052 | | | | | | |
| 314 | 840862 | cysteine-rich intestinal protein [Homo | gi\|1381638 | 36 | 353 | 100 | 100 | HEPAP58 |
| | | sapiens] >pir\|G02666\|G02666 cysteine-rich | | | | | | |
| | | protein 1 - human Length = 77 | | | | | | |
| 315 | 840864 | | | 407 | 1096 | | | HTLHY48 |
| 316 | 840936 | homologous to Swiss-Prot accession number | gi\|435425 | 3 | 668 | 79 | 79 | HOENU32 |
| | | P16371 [Homo sapiens] >gi\|3850562 | | | | | | |
| | | (AC005944) GRG_HUMAN; ESP1 | | | | | | |
| | | PROTEIN; AMINO ENHANCER OF SPLIT; | | | | | | |
| | | AES-1/AES-2; gpl30 associated protein | | | | | | |
| | | GAM [Homo sapiens] >pir\|G01236\|G01236 | | | | | | |
| | | enhancer of split m9/m10 (groucho protein) | | | | | | |
| 317 | 840938 | carbonyl reductase [Sus scrofa] | gnl\|PID\|d10044 | 2 | 745 | 65 | 76 | HMCAI75 |
| | | >pir\|JN0703\|JN0703 carbonyl reductase | 79 | | | | | |
| | | (NADPH)(EC 1.1.1.184) -pig | | | | | | |
| | | >5p\|Q29529\|CBR2_PIG LUNG CARBONYL | | | | | | |
| | | REDUCTASE [NADPH] (EC 1.1.1.184) | | | | | | |
| | | (NADPH-DEPENDENT CARBONYL | | | | | | |
| | | REDUCTASE) (LCR). Length = 244 | | | | | | |
| 318 | 841884 | | | 677 | 1324 | | | HLQBI45 |
| 319 | 842241 | (AJ009698) embigin protein [Rattus | gnl\|PID\|e13129 | 2 | 952 | 60 | 75 | HOFMD52 |
| | | norvegicus] >sp\|O88775\|O88775 EMBIGIN | 86 | | | | | |
| | | PROTEIN PRECURSOR. Length = 328 | | | | | | |
| 320 | 843712 | | | 2 | 202 | | | HSSGR77 |
| 321 | 844040 | ribosomal protein L11 [Caenorhabditis | gi\|156201 | 75 | 500 | 42 | 64 | HPTGB84 |
| | | elegans] >pir\|527795\|527795 ribosomal | | | | | | |
| | | protein L11 homolog - Caenorhabditis elegans | | | | | | |
| | | Length = 195 | | | | | | |
| 322 | 844336 | (AB009462) LDL receptor related protein 105 | gnl\|PID\|d10332 | 831 | 2285 | 68 | 75 | HWMFE21 |
| | | [Homo sapiens] >sp\|O75074\|O75074 LDL | 92 | | | | | |
| | | RECEPTOR RELATED PROTEIN 105. | | | | | | |
| | | Length = 770 | | | | | | |
| 323 | 844612 | collagen binding protein 2 [Homo sapiens] | gnl\|PID\|d10l24 | 528 | 1466 | 96 | 97 | HOFME75 |
| | | >pir\|I52968\|I52968 colligin-2 - human | 96 | | | | | |
| | | >sp\|P50454\|CBP2_HUMAN COLLAGEN- | | | | | | |
| | | BINDING PROTEIN 2 PRECURSOR | | | | | | |
| | | (COLLIGIN 2). Length = 418 | | | | | | |
| 324 | 844617 | | | 556 | 735 | | | HMVCZ36 |
| 325 | 845251 | LIV-1 protein [Homo sapiens] | gi\|1256001 | 23 | 634 | 49 | 67 | HBGBB42 |
| | | >pir\|G02273\|G02273 LIV-1 protein - human | | | | | | |
| | | >sp\|Q13433\|Q13433 ESTROGEN | | | | | | |
| | | REGULATED LIV-1 PROTEIN. Length = | | | | | | |
| | | 752 | | | | | | |
| 326 | 845764 | | | 2 | 244 | | | HULCF61 |
| 327 | 846187 | ATPase alpha subunit (aa 1-1023) [Homo | gi\|28927 | 151 | 2403 | 92 | 92 | HDPLV27 |
| | | sapiens] >gnl\|PID\|d1000505 Na,K-ATPase | | | | | | |
| | | alpha-subunit [Homo sapiens] | | | | | | |
| | | >pir\|A24414\|A24414 Na+/K+-exchanging | | | | | | |
| | | ATPase (EC 3.6.1.37) alpha-1 chain - human | | | | | | |
| | | >sp\|P05O23\|ATN1_HUMAN | | | | | | |
| | | SODIUM/POTASSIUM-TRANSPORTING | | | | | | |
| | | ATPASE ALPHA-1 C | | | | | | |
| 328 | HBGDH47R | | | 167 | 241 | | | HBGDH47 |
| 329 | HHENQ86R | | | 2 | 112 | | | HHENQ86 |
| 330 | HBGBH23R | (AE000161) bacteriophage lambda | gi\|1786769 | 1 | 213 | 92 | 92 | HBGBH23 |
| | | endopeptidase homolog [Escherichia coli] | | | | | | |
| | | >pir\|B64788\|B64788 bacteriophage lambda | | | | | | |
| | | endopeptidase homolog (EC 3.4.-.-) - | | | | | | |
| | | Escherichia coli (strain K-12) | | | | | | |
| | | >sp\|P75719\|ENPP_ECOLI PUTATIVE | | | | | | |
| | | ENDOPEPTIDASE (EC 3.4.-.-). Length = | | | | | | |
| | | 153 | | | | | | |
| 331 | HANGA53R | (AF013214) acidic ribosomal phosphoprotein | gi\|2293577 | 76 | 402 | 80 | 84 | HANGA53 |
| | | PO [Bos taurus] Length = 302 | | | | | | |
| 332 | HBIMC29R | (AF035959) type-2 phosphatidic acid | gi\|3123896 | 3 | 317 | 96 | 96 | HBIMC29 |
| | | phosphatase-gamma; phosphatidate | | | | | | |
| | | phosphohydrolase; phospholipid phosphatase | | | | | | |
| | | [Homo sapiens] >gi\|3025880 (AE056083) | | | | | | |
| | | phosphatidic acid phosphatase type 2 [Homo | | | | | | |
| | | sapiens] >gi\|2911498 (AF047760) | | | | | | |
| | | phosphatidic acid phosphohydro | | | | | | |
| 333 | HOFAB89R | (AF061340) F1 ATPase subunit 6 [Artibeus | gi\|4164480 | 86 | 268 | 67 | 82 | HOFAB89 |
| | | jamaicensis] Length = 226 | | | | | | |
| 334 | HAHCP93R | (AF070447) barrier-to-autointegration factor | gi\|3220255 | 116 | 289 | 69 | 76 | HAHCP93 |
| | | [Homo sapiens] >sp\|O75531\|O75531 | | | | | | |
| | | BARR WR-TO-AUTOINTEGRATION | | | | | | |
| | | FACTOR. Length = 89 | | | | | | |
| 335 | HBGAA76R | | | 14 | 232 | | | HBGAA76 |
| 336 | HBGBT12R | A (DNA packaging;641) [Bacteriophage | gi\|215106 | 2 | 349 | 95 | 95 | HBGBT12 |
| | | lambda] >pir\|D04333\|JVBPAL DNA- | | | | | | |
| | | packaging protein A - phage lambda Length = | | | | | | |
| | | 641 | | | | | | |
| 337 | HBGBH53R | Actin [Drosophila melanogaster] | gi\|7550 | 2 | 445 | 93 | 97 | HBGBH53 |
| | | >pir\|S14851\|S14851 actin - fruit fly | | | | | | |
| | | (Drosophila melanogaster) | | | | | | |
| | | >sp\|Q24228\|Q24228 ACTIN. Length = 100 | | | | | | |
| 338 | HTXPI29R | aldolase A (EC4.1.3.13) [Homo sapiens] | gi\|178351 | 1 | 453 | 86 | 86 | HTXPI29 |
| | | >gi\|28597 aldolase A (AA 1-364) [Homo | | | | | | |
| | | sapiens] >pir\|S14084\|ADHUA fructose- | | | | | | |
| | | bisphosphate aldolase (EC 4.1.2.13) A - | | | | | | |
| | | human >sp\|P04075\|ALFA HUMAN | | | | | | |
| | | FRUCTOSE-BISPHOSPHATE ALDOLASE | | | | | | |
| | | A (EC 4.1.2.13) (MUSCLE-TYPE | | | | | | |
| | | ALDOLASE). {S | | | | | | |
| 339 | HOFMG33R | ATPase [Equus caballus] | gi\|577577 | 28 | 309 | 57 | 62 | HOFMG33 |
| | | >sp\|P48662\|ATP6_HORSE ATP SYNTHASE | | | | | | |
| | | A CHAIN (EC 3.6.1.34) (PROTEIN 6). | | | | | | |
| | | Length = 226 | | | | | | |
| 340 | HCGAC11R | | | 1 | 345 | | | HCGAC11 |
| 341 | HCIAC54R | | | 37 | 168 | | | HCIAC54 |
| 342 | HBGAA54R | | | 1 | 282 | | | HBGAA54 |
| 343 | HAOMC34R | calpactin I heavy chain (p36) [Bos taurus] | gi\|162779 | 2 | 115 | 73 | 80 | HAOMC34 |
| | | >pir\|A03081\|LUBO36 annexin II - bovine | | | | | | |
| | | >sp\|P04272\|ANX2_BOVIN ANNEXIN II | | | | | | |
| | | (LIPOCORTIN II) (CALPACTIN I HEAVY | | | | | | |
| | | CHAIN) (CHROMOBINDIN 8) (P36) | | | | | | |
| | | (PROTEIN I) (PLACENTAL | | | | | | |
| | | ANTICOAGULANT PROTEIN IV) (PAP- | | | | | | |
| | | IV). {SUB 2-339} Leng | | | | | | |
| 344 | H2LAU88R | copine I [Homo sapiens] >sp\|Q99829\|Q99829 | gi\|1791257 | 1 | 576 | 95 | 95 | H2LAU88 |
| | | COPINE I. Length = 537 | | | | | | |
| 345 | HDPJR77R | DNA topoisomerase II [Homo sapiens] | gi\|288565 | 3 | 311 | 100 | 100 | HDPJR77 |
| | | >gi\|38325 DNA topoisomerase II [Homo | | | | | | |
| | | sapiens] {SUB 448-681} Length = 1031 | | | | | | |
| 346 | HTTIO41R | docking protein [Homo sapiens] | gi\|30866 | 90 | 404 | 94 | 95 | HTTIO41 |
| | | >pir\|A29440\|A29440 signal recognition | | | | | | |
| | | particle receptor - human Length = 638 | | | | | | |
| 347 | H2CBU29R | electron transport flavoprotein [Homo | gi\|182251 | 2 | 442 | 100 | 100 | H2CBU29 |
| | | sapiens] >pir\|A31998\|A31998 electron | | | | | | |
| | | transfer flavoprotein alpha chain precursor - | | | | | | |
| | | human >sp\|P13804\|ETFA_HUMAN | | | | | | |
| | | ELECTRON TRANSFER FLAVOPROTEIN | | | | | | |
| | | ALPHA-SUBUNIT PRECURSOR (ALPHA- | | | | | | |
| | | ETF). >gnl\|PID\|e1331769 (AJ224002) | | | | | | |
| | | electron | | | | | | |
| 348 | HBMVA11R | GARS protein [Homo sapiens] | gnl\|PDI\|d10073 | 1 | 108 | 81 | 84 | HBMVA11 |
| | | >sp\|Q15374\|Q15374 GARS PROTEIN. | 83 | | | | | |
| | | Length = 433 | | | | | | |
| 349 | HDPUL86R | GC kinase [Homo sapiens] | gi\|531820 | 3 | 317 | 64 | 65 | HDPUL86 |
| | | >pir\|A53714\|A53714 protein kinase (EC | | | | | | |
| | | 2.7.1.37) BL44 - human >sp\|Q12851\|Q12851 | | | | | | |
| | | GC KINASE. Length = 819 | | | | | | |
| 350 | HTXNT16R | GTP-binding protein [Homo sapiens] | gi\|577779 | 2 | 463 | 100 | 100 | HTXNT16 |
| | | >gi\|577779 GTP-binding protein [Homo | | | | | | |
| | | sapiens] >pir\|A55014\|A55014 GTP-binding | | | | | | |
| | | protein - human >sp\|P55039\|DRG2_HUMAN | | | | | | |
| | | DEVELOPMENTALLY REGULATED | | | | | | |
| | | GTP-BINDING PROTEIN DRG2. Length = | | | | | | |
| | | 364 | | | | | | |
| 351 | HBGAA13R | H (tail component;853) [Bacteriophage | gi\|215120 | 1 | 267 | 97 | 97 | HBGAA13 |
| | | lambda] >pir\|G43008\|TLBPHL minor tail | | | | | | |
| | | protein precursor H - phage lambda Length = | | | | | | |
| | | 853 | | | | | | |
| 352 | HLXNA54R | heat shock protein HSP27 [Homo sapiens] | gi\|32478 | 2 | 256 | 98 | 98 | HLXNA54 |
| | | >gi\|433598 28 kDa heat shock protein [Homo | | | | | | |
| | | sapiens] >gi\|1913885 heat shock protein | | | | | | |
| | | [Homo sapiens] >pir\|S12102\|HHHU27 heat | | | | | | |
| | | shock protein 27 - human | | | | | | |
| | | >sp\|G248440\|G248440 28 KDA HEAT | | | | | | |
| | | SHOCK PROTEIN HOMOLOG | | | | | | |
| | | FRAGMENT 2. {S | | | | | | |
| 353 | HCHOH37R | Hep27 protein [Homo sapiens] | gi\|1079566 | 337 | 564 | 75 | 81 | HCHOH37 |
| | | >pir\|S66665\|S66665 nuclear protein Hep27 - | | | | | | |
| | | human >sp\|Q13268\|HE27_HUMAN HEP27 | | | | | | |
| | | PROTEIN (PROTEIN D). {SUB 24-280} | | | | | | |
| | | Length = 280 | | | | | | |
| 354 | H2LAX93R | histone H2B [Gallus gallus] >gi\|63434 histone | gi\|2l1845 | 191 | 505 | 89 | 96 | H2LAX93 |
| | | H2B [Callus gallus] >gi\|63452 histone H2B | | | | | | |
| | | (AA 1-126) [Callus gallus] >gi\|63456 | | | | | | |
| | | histone H2B (AA 1-126) [Callus gallus] | | | | | | |
| | | >gi\|63458 histone H2B [Callus gallus] | | | | | | |
| | | >gi\|63460 histone H2B (AA 1-126) [Callus | | | | | | |
| | | gallus | | | | | | |
| 355 | HWAFW10R | homologue to elongation factor 1-gamma | gi\|31102 | 3 | 434 | 98 | 98 | HWAFW10 |
| | | from A.salina [Homo sapiens] >gi\|31104 | | | | | | |
| | | elongation factor-1-gamma [Homo sapiens] | | | | | | |
| | | >pir\|S22655\|S22655 translation elongation | | | | | | |
| | | factor eEF-1 gamma chain - human | | | | | | |
| | | >sp\|P26641\|EF1C_HUMAN ELONGATION | | | | | | |
| | | FACTOR 1-GAMMA (EF-1-GAMMA). | | | | | | |
| 356 | HBNAB19R | human complement Cir [Homo sapiens] | gi\|179644 | 2 | 193 | 98 | 98 | HBNAB19 |
| | | >pir\|A2417\|C1HURB complement | | | | | | |
| | | subcomponent Cir (EC 3.4.21.41) precursor - | | | | | | |
| | | human >sp\|P00736\|CIR_HUMAN | | | | | | |
| | | COMPLEMENT CIR COMPONENT | | | | | | |
| | | PRECURSOR (EC 3.4.21.41). Length = 705 | | | | | | |
| 357 | HBGDD17R | hypothetical protein [Escherichia coli] | gi\|1778474 | 1 | 207 | 98 | 98 | HBGDD17 |
| | | >gil 1786774 (AE000161) orf, hypothetical | | | | | | |
| | | protein [Escherichia coli] | | | | | | |
| | | >pir\|G64788\|G64788 hypothetical protein | | | | | | |
| | | b0561 - Escherichia coli (strain K-12) Length = | | | | | | |
| | | 247 | | | | | | |
| 358 | HBIAB72R | hypoxanthine phosphoribosyltransferase [Sus | gnl\|PID\|e29196 | 2 | 169 | 81 | 86 | HBIAB72 |
| | | scrofa]>sp\|P79306\|P79306 | 9 | | | | | |
| | | HYPOXANTHINE | | | | | | |
| | | PHOSPHORIBOSYLTRANSFERASE | | | | | | |
| | | (FRAGMENT). Length = 85 | | | | | | |
| 359 | HFIEH41R | interferon-gamma induced protein [Homo | gi\|184569 | 5 | 406 | 96 | 97 | HFIEH41 |
| | | sapiens] >pir\|I5450\|I54501 interferon | | | | | | |
| | | gamma-induced protein IFI 16 - human | | | | | | |
| | | >sp\|Q16666\|IF16_HUMAN GAMMA- | | | | | | |
| | | INTERFERON-INDUCIBLE PROTEIN IFI- | | | | | | |
| | | 16 (INTERFERON-INDUCIBLE MYBLOID | | | | | | |
| | | DIFERENTIATION TRANSCRIPTIONAL | | | | | | |
| | | ACTIVATOR). Le | | | | | | |
| 360 | H2CBB43R | J (tail:host specificity;1132) [Bacteriophage | gi\|215125 | 2 | 400 | 99 | 99 | H2CBB43 |
| | | lambda]>pir\|D43009\|QSBPL host specificity | | | | | | |
| | | protein J - phage lambda Length = 1132 | | | | | | |
| 361 | H2CBQ77R | J (tail:host specificity;1132) [Bacteriophage | gi\|215125 | 3 | 272 | 97 | 97 | H2CBQ77 |
| | | lambda] >pir\|D43009\|QSBPL host specificity | | | | | | |
| | | protein J - phage lambda Length = 1132 | | | | | | |
| 362 | HATAO24R | J (tail:host specificity; 1132) [Bacteriophage | gi\|215125 | 2 | 247 | 71 | 71 | HATAO24 |
| | | lambda] >pir\|D43009\|QSBPL host specificity | | | | | | |
| | | protein J - phage lambda Length = 1132 | | | | | | |
| 363 | HOEMKO6R | K (tail component;199) [Bacteriophage | gi\|215123 | 3 | 149 | 97 | 97 | HOEMK06 |
| | | lambda] >pir\|H43009\|TJBPKL tail assembly | | | | | | |
| | | protein K - phage lambda Length = 199 | | | | | | |
| 364 | HADCH03R | mitochondrial acetoacetyl-CoA thiolase | gnl\|PID\|d10149 | 2 | 256 | 83 | 83 | HADCH03 |
| | | precursor [Homo sapiens] Length = 427 | 83 | | | | | |
| 365 | HCHAG30R | Mtal [Rattus norvegicus] | gi\|595253 | 2 | 271 | 92 | 92 | HCHAG30 |
| | | >pir\|A54766\|A54766 metastasis-associated | | | | | | |
| | | protein mta-1 - rat >sp\|Q62599\|MTA1_RAT | | | | | | |
| | | METASTASIS-ASSOCIATED PROTEIN | | | | | | |
| | | MTA1. Length = 703 | | | | | | |
| 366 | HOFAD96R | NADH dehydrogenase subunit 4L [Felis | gi\|1098532 | 2 | 253 | 50 | 52 | HOFAD96 |
| | | catus] >sp\|P48931\|NULM_FELCA NADH- | | | | | | |
| | | UBIQUINONE OXIDOREDUCTASE | | | | | | |
| | | CHAIN 4L (EC 1.6.5.3). Length = 98 | | | | | | |
| 367 | H2CBXO7R | Nm 221 (pept unknown;221) [Bacteriophage | gi\|215160 | 2 | 184 | 100 | 100 | H2CBX07 |
| | | lambda] >pir\|G43011\|Q1BPIL multiple | | | | | | |
| | | specificity phosphoprotein phosphatase (EC | | | | | | |
| | | 3.1.3.-) - phage lambda | | | | | | |
| | | >sp\|P03772\|PP_LAMBD | | | | | | |
| | | SERINE/THREONINE PROTEIN | | | | | | |
| | | PHOSPHATASE (EC 3.1.3.16). Length = 221 | | | | | | |
| 368 | HDPLN02R | nuclear corepressor KAP-1 [Homo sapiens] | gi\|1699027 | 149 | 454 | 90 | 90 | HDPLN02 |
| | | Length = 835 | | | | | | |
| 369 | HT4FU27R | nuclear corepressor KAP-1 [Homo sapiens] | gi\|1699027 | 96 | 287 | 95 | 95 | HT4FU27 |
| | | Length = 835 | | | | | | |
| 370 | HAEAI26R | open reading frame A; putative [Homo | gi\|190369 | 109 | 291 | 78 | 80 | HAEAI26 |
| | | sapiens] Length = 84 | | | | | | |
| 371 | HCDAR56R | p23 [Homo sapiens] >pir\|A56211\|A56211 | gi\|438652 | 2 | 208 | 90 | 92 | HCDAR56 |
| | | progesterone receptor-related protein p23 - | | | | | | |
| | | human >sp\|Q15185\|Q15185 (P23). Length = | | | | | | |
| | | 160 | | | | | | |
| 372 | HCDCW35R | precursor [Homo sapiens] Length = 631 | gi\|36049 | 3 | 155 | 78 | 84 | HCDCW35 |
| 373 | H2CBN76R | proteasome subunit C5 [Homo sapiens] | gnl\|PID\|d10011 | 3 | 464 | 99 | 99 | H2CBN76 |
| | | >gnl\|PID\|e1334433 (AL031259) C5 | 16 | | | | | |
| | | (proteasome subunit HC5) [Homo sapiens] | | | | | | |
| | | >pir\|S15973\|SNHUC5 multicatalytic | | | | | | |
| | | endopeptidase complex (EC 3.4.99.46) chain | | | | | | |
| | | C5 - human >sp\|P20618\|PRC5_HUMAN | | | | | | |
| | | PROTEASOME COMPONENT C5 (EC | | | | | | |
| | | 3.4.99.4 | | | | | | |
| 374 | HAGFX49R | proteasome subunit C5 [Homo sapiens] | gnl\|PID\|d 10011 | 1 | 288 | 98 | 100 | HAGFX49 |
| | | >gnl\|PID\|e1334433 (AL031259) C5 | 16 | | | | | |
| | | (proteasome subunit HC5) [Homo sapiens] | | | | | | |
| | | >pir\|S15973\|SNHUC5 multicatalytic | | | | | | |
| | | endopeptidase complex (EC 3.4.99.46) chain | | | | | | |
| | | C5 - human >sp\|P20618\|PRC5_HUMAN | | | | | | |
| | | PROTEASOME COMPONENT C5 (EC | | | | | | |
| | | 3.4.99.4 | | | | | | |
| 375 | HNEEG64R | put. major coat protein (AA 1-34 1) | gi\|15769 | 17 | 232 | 81 | 97 | HNEEG64 |
| | | [Bacteriophage phi-80] >pir\|S03314\|VHBP80 | | | | | | |
| | | major capsid protein - phage phi-80 | | | | | | |
| | | >sp\|P05481\|HEAD_BPPH8 MAJOR HEAD | | | | | | |
| | | PROTEIN (GPE) (GP5) (MAJOR COAT | | | | | | |
| | | PROTEIN). Length = 341 | | | | | | |
| 376 | HTXKR32R | putative nucleotide-binding protein [Homo | gi\|515644 | 3 | 374 | 100 | 100 | HTXKR32 |
| | | sapiens] >pir\|JC4010\|JC4010 nucleotide- | | | | | | |
| | | binding protein - human | | | | | | |
| | | >sp\|P53384\|NBP_HUMAN NUCLEOTIDE- | | | | | | |
| | | BINDING PROTEIN (NBP). Length = 320 | | | | | | |
| 377 | HAIBZ58R | putative start codon [Homo sapiens] Length = | gi\|895845 | 2 | 433 | 65 | 65 | HAIBZ58 |
| | | 210 | | | | | | |
| 378 | H6EAE46R | rexa (exclusion;279) [Bacteriophage lambda] | gi\|215146 | 43 | 333 | 92 | 93 | H6EAF46 |
| | | >gi\|15068 reading frame (rexi protein) | | | | | | |
| | | [Bacteriophage 434] >pir\|E43010\|IMBPAL | | | | | | |
| | | rexA protein - phage lambda Length = 279 | | | | | | |
| 379 | H2LAW60R | ribosomal protein L27a [Homo sapiens] | gi\|550017 | 3 | 545 | 88 | 88 | H2LAW60 |
| | | >pir\|S55914\|S55914 ribosomal protein L27a - | | | | | | |
| | | human Length = 148 | | | | | | |
| 380 | H2LAK40R | ribosomal protein L31 [Sus scrofa] >gi\|36130 | gnl\|PID\|e27643 | 76 | 483 | 77 | 80 | H2LAK40 |
| | | ribosomal protein L31 (AA 1-125) [Homo | 6 | | | | | |
| | | sapiens] >gi\|57115 ribosomal protein L31 | | | | | | |
| | | (AA 1-125) [Rattus norvegicus] | | | | | | |
| | | >pir\|S05576\|R5HU31 ribosomal protein L31 - | | | | | | |
| | | human >pir\|A26417\|R5RT31 ribosomal | | | | | | |
| | | protein L31 - rat >gn | | | | | | |
| 381 | H2LAY71R | ribosomal protein L35 [Homo sapiens] | gi\|562074 | 70 | 495 | 100 | 100 | H2LAY71 |
| | | >pir\|G01477\|G01477 ribosomal protein L35 - | | | | | | |
| | | human Length = 123 | | | | | | |
| 382 | HCHAH62R | ribosomal protein L8 [Homo sapiens] | gi\|433899 | 1 | 222 | 76 | 76 | HCHAH62 |
| | | >gi\|57704 ribosomal protein L8 [Rattus rattus] | | | | | | |
| | | >gi\|1527178 ribosomal protein L8 [Mus | | | | | | |
| | | musculus] >pir\|JU0177\|R5RTL8 ribosomal | | | | | | |
| | | protein L8, cytosolic - rat >pir\|JN0923\|JN0923 | | | | | | |
| | | ribosomal protein L8, cytosolic - human | | | | | | |
| | | >gi\|3851 | | | | | | |
| 383 | H6EEF31R | ribosomal protein 82 [Rattus norvegicus] | gi\|2920825 | 1 | 300 | 89 | 91 | H6EEF31 |
| | | >sp\|O55211\|O55211 RIBOSOMAL | | | | | | |
| | | PROTEIN 82. Length = 257 | | | | | | |
| 384 | HDPBT55R | RNAse L inhibitor [Mus musculus] | gi\|3273417 | 71 | 127 | 81 | 86 | HDPBT55 |
| | | >sp\|O88793\|O88793 RNASE L INHIBITOR. | | | | | | |
| | | Length = 599 | | | | | | |
| 385 | HASAW8OR | S.macroura Wilms tumour protein | gi\|987118 | 1 | 162 | 90 | 98 | HASAW80 |
| | | [Sminthopsis macroura] Length = 239 | | | | | | |
| 386 | HCHAF2SR | SSR alpha subunit [Homo sapiens] | gi\|551638 | 2 | 421 | 95 | 95 | HCHAF25 |
| | | >pir\|I38246\|I38246 SSR alpha subunit - | | | | | | |
| | | human Length = 286 | | | | | | |
| 387 | HLTHH84R | UMP synthase [Homo sapiens] | gi\|340168 | 2 | 391 | 99 | 99 | HLTHH84 |
| | | >pir\|A30148\|A30148 UMP synthase - human | | | | | | |
| | | Length = 480 | | | | | | |
| 388 | H2CBU20R | | | 39 | 143 | | | H2CBU20 |
| 389 | HADAA62R | | | 3 | 218 | | | HADAA62 |
| 390 | HADDC09R | | | 16 | 174 | | | HADDC09 |
| 391 | HAIAB75R | | | 2 | 211 | | | HAIAB75 |
| 392 | HAMGA37R | | | 3 | 119 | | | HAMGA37 |
| 393 | HAQAI10R | | | 1 | 81 | | | HAQAI10 |
| 394 | HBFME95R | | | 3 | 218 | | | HBFME95 |
| 395 | HBGBH24R | | | 1 | 81 | | | HBGBH24 |
| 396 | HBGBT78R | | | 1 | 69 | | | HBGBT78 |
| 397 | HBGCB06R | | | 3 | 140 | | | HBGCB06 |
| 398 | HBGDO01R | | | 1 | 156 | | | HBGDO01 |
| 399 | HBIBJ73R | | | 3 | 341 | | | HBIBJ73 |
| 400 | HBJLE85R | | | 3 | 398 | | | HBJLE85 |
| 401 | HBNAD53R | | | 2 | 187 | | | HBNAD53 |
| 402 | HBNAT63R | | | 54 | 173 | | | HBNAT63 |
| 403 | HCE4H65R | | | 2 | 193 | | | HCE4H65 |
| 404 | HCFLJ44R | | | 92 | 274 | | | HCFLJ44 |
| 405 | HCHMW05R | | | 3 | 221 | | | HCHMW05 |
| 406 | HCHNR50R | | | 2 | 103 | | | HCHNR50 |
| 407 | HE8DS01R | | | 2 | 64 | | | HE8DS01 |
| 408 | HFEBP31R | | | 109 | 276 | | | HFEBP31 |
| 409 | HLDXE36R | | | 6 | 167 | | | HLDXE36 |
| 410 | HLTGV28R | | | 181 | 414 | | | HLTGV28 |
| 411 | HODFW25R | | | 42 | 308 | | | HODFW25 |
| 412 | HOEMQ91R | | | 1 | 129 | | | HOEMQ91 |
| 413 | HOGBG56R | | | 57 | 386 | | | HOGBG56 |
| 414 | HOSMT44R | | | 2 | 151 | | | HOSMT44 |
| 415 | HRAEE04R | | | 51 | 191 | | | HRAEE04 |
| 416 | HULFN65R | | | 3 | 272 | | | HULFN65 |
| 417 | HWLVW23R | | | 1 | 153 | | | HWLVW23 |
| 418 | HWLWE77R | | | 149 | 289 | | | HWLWE77 |

[0052] The first column of Table 1 shows the “SEQ ID NO:” for each of the 418 ovarian and/or breast antigen polynucleotide sequences of the invention.

[0053] The second column in Table 1, provides a unique “Sequence/Contig ID” identification for each breast, ovarian, breast cancer and/or ovarian cancer associated sequence. The third column in Table 1, “Gene Name,” provides a putative identification of the gene based on the sequence similarity of its translation product to an amino acid sequence found in a publicly accessible gene database, such as GenBank (NCBI). The great majority of the cDNA sequences reported in Table 1 are unrelated to any sequences previously described in the literature. The fourth column, in Table 1, “Overlap,” provides the database accession no. for the database sequence having similarity. The fifth and sixth columns in Table 1 provide the location (nucleotide position nos. within the contig), “Start” and “End”, in the polynucleotide sequence “SEQ ID NO:X” that delineate the preferred ORF shown in the sequence listing as SEQ ID NO:Y. In one embodiment, the invention provides a protein comprising, or alternatively consisting of, a polypeptide encoded by the portion of SEQ ID NO:X delineated by the nucleotide position nos. “Start” and “End”. Also provided are polynucleotides encoding such proteins and the complementary strand thereto. The seventh and eighth columns provide the “% Id” (percent identity) and “% Si” (percent similarity) observed between the aligned sequence segments of the translation product of SEQ ID NO:X and the database sequence.

[0054] The ninth column of Table 1 provides a unique “Clone ID” for a clone related to each contig sequence. This clone ID references the cDNA clone which contains at least the 5′ most sequence of the assembled contig and at least a portion of SEQ ID NO:X was determined by directly sequencing the referenced clone. The reference clone may have more sequence than described in the sequence listing or the clone may have less. In the vast majority of cases, however, the clone is believed to encode a full-length polypeptide. In the case where a clone is not full-length, a full-length cDNA can be obtained by methods described elsewhere herein.

[0055] Table 3 indicates public ESTs, of which at least one, two, three, four, five, ten, or more of any one or more of these public ESTs are optionally excluded from the invention.

[0056] SEQ ID NO:X (where X may be any of the polynucleotide sequences disclosed in the sequence listing as SEQ ID NO:1 through SEQ ID NO:418) and the translated SEQ ID NO:Y (where Y may be any of the polypeptide sequences disclosed in the sequence listing as SEQ ID NO:418 through SEQ ID NO:836) are sufficiently accurate and otherwise suitable for a variety of uses well known in the art and decribed further below. For instance, SEQ ID NO:X has uses including, but not limited to, in designing nucleic acid hybridization probes that will detect nucleic acid sequences contained in SEQ ID NO:X or the related cDNA clone contained in a library deposited with the ATCC. These probes will also hybridize to nucleic acid molecules in biological samples, thereby enabling immediate applications in chromosome mapping, linkage analysis, tissue identification and/or typing, and a variety of forensic and diagnostic methods of the invention. Similarly, polypeptides identified from SEQ ID NO:Y have uses that include, but are not limited to, generating antibodies which bind specifically to the ovarian and/or breast antigen polypeptides, or fragments thereof, and/or to the ovarian and/or breast antigen polypeptides encoded by the cDNA clones identified in Table 1.

[0057] Nevertheless, DNA sequences generated by sequencing reactions can contain sequencing errors. The errors exist as misidentified nucleotides, or as insertions or deletions of nucleotides in the generated DNA sequence. The erroneously inserted or deleted nucleotides cause frame shifts in the reading frames of the predicted amino acid sequence. In these cases, the predicted amino acid sequence diverges from the actual amino acid sequence, even though the generated DNA sequence may be greater than 99.9% identical to the actual DNA sequence (for example, one base insertion or deletion in an open reading frame of over 1000 bases).

[0058] Accordingly, for those applications requiring precision in the nucleotide sequence or the amino acid sequence, the present invention provides not only the generated nucleotide sequence identified as SEQ ID NO:X, the predicted translated amino acid sequence identified as SEQ ID NO:Y, but also a sample of plasmid DNA containing the related cDNA clone (deposited with the ATCC, as set forth in Table 1). The nucleotide sequence of each deposited clone can readily be determined by sequencing the deposited clone in accordance with known methods. Further, techniques known in the art can be used to verify the nucleotide sequences of SEQ ID NO:X.

[0059] The predicted amino acid sequence can then be verified from such deposits. Moreover, the amino acid sequence of the protein encoded by a particular clone can also be directly determined by peptide sequencing or by expressing the protein in a suitable host cell containing the deposited human cDNA, collecting the protein, and determining its sequence.

[0060] The present invention also relates to vectors or plasmids which include such DNA sequences, as well as the use of the DNA sequences. The material deposited with the ATCC on:

TABLE 2

| ATCC Deposits | Deposit Date | ATCC Designation Number |
|---|---|---|
| LP01, LP02, LP03, | May-20-97 | 209059, 209060, 209061, 209062, |
| LP04, LP05, LP06, | | 209063, 209064, 209065, 209066, |
| LP07, LP08, LP09, | | 209067, 209068, 209069 |
| LP10, LP11, | | |
| LP12 | Jan-12-98 | 209579 |
| LP13 | Jan-12-98 | 209578 |
| LP14 | Jul-16-98 | 203067 |
| LP15 | Jul-16-98 | 203068 |
| LP16 | Feb-1-99 | 203609 |
| LP17 | Feb-1-99 | 203610 |
| LP20 | Nov-17-98 | 203485 |
| LP21 | Jun-18-99 | PTA-252 |
| LP22 | Jun-18-99 | PTA-253 |
| LP23 | Dec-22-99 | PTA-1081 |

[0061] each is a mixture of cDNA clones derived from a variety of human tissue and cloned in either a plasmid vector or a phage vector, as shown in Table 5. These deposits are referred to as “the deposits” herein. The tissues from which the clones were derived are listed in Table 5, and the vector in which the cDNA is contained is also indicated in Table 5. The deposited material includes the cDNA clones which were partially sequenced and are related to the SEQ ID NO:X described in Table 1 (column 9). Thus, a clone which is isolatable from the ATCC Deposits by use of a sequence listed as SEQ ID NO:X may include the entire coding region of a human gene or in other cases such clone may include a substantial portion of the coding region of a human gene. Although the sequence listing lists only a portion of the DNA sequence in a clone included in the ATCC Deposits, it is well within the ability of one skilled in the art to complete the sequence of the DNA included in a clone isolatable from the ATCC Deposits by use of a sequence (or portion thereof) listed in Table 1 by procedures hereinafter further described, and others apparent to those skilled in the art.

[0062] Also provided in Table 5 is the name of the vector which contains the cDNA clone. Each vector is routinely used in the art. The following additional information is provided for convenience.

[0063] Vectors Lambda Zap (U.S. Pat. Nos. 5,128,256 and 5,286,636), Uni-Zap XR (U.S. Pat. Nos. 5,128, 256 and 5,286,636), Zap Express (U.S. Pat. Nos. 5,128,256 and 5,286,636), pBluescript (pBS) (Short, J. M. et al., Nucleic Acids Res. 16:7583-7600 (1988); Alting-Mees, M. A. and Short, J. M., Nucleic Acids Res. 17:9494 (1989)) and pBK (Alting-Mees, M. A. et al., Strategies 5:58-61 (1992)) are commercially available from Stratagene Cloning Systems, Inc., 11011 N. Torrey Pines Road, La Jolla, CA, 92037. pBS contains an ampicillin resistance gene and pBK contains a neomycin resistance gene. Phagemid pBS may be excised from the Lambda Zap and Uni-Zap XR vectors, and phagemid pBK may be excised from the Zap Express vector. Both phagemids may be transformed into E. coli strain XL-1 Blue, also available from Stratagene.

[0064] Vectors pSport1, pCMVSport 1.0, pCMVSport 2.0 and pCMVSport 3.0, were obtained from Life Technologies, Inc., P. O. Box 6009, Gaithersburg, Md. 20897. All Sport vectors contain an ampicillin resistance gene and may be transformed into E. coli strain DH10B, also available from Life Technologies. See, for instance, Gruber, C. E., et al., Focus 15:59 (1993). Vector lafmid BA (Bento Soares, Columbia University, New York, N.Y.) contains an ampicillin resistance gene and can be transformed into E. coli strain XL-1 Blue. Vector pCR®2.1, which is available from Invitrogen, 1600 Faraday Avenue, Carlsbad, Calif. 92008, contains an ampicillin resistance gene and may be transformed into E. coli strain DH10B, available from Life Technologies. See, for instance, Clark, J. M., Nuc. Acids Res. 16:9677-9686 (1988) and Mead, D. et al., Bio/Technology 9: (1991).

[0065] The present invention also relates to the genes corresponding to SEQ ID NO:X, SEQ ID NO:Y, and/or the cDNA contained in a deposited cDNA clone. The corresponding gene can be isolated in accordance with known methods using the sequence information disclosed herein. Such methods include, but are not limited to, preparing probes or primers from the disclosed sequence and identifying or amplifying the corresponding gene from appropriate sources of genomic material.

[0066] Also provided in the present invention are allelic variants, orthologs, and/or species homologs. Procedures known in the art can be used to obtain full-length genes, allelic variants, splice variants, full-length coding portions, orthologs, and/or species homologs of genes corresponding to SEQ ID NO:X, SEQ ID NO:Y, and/or the cDNA contained in the related cDNA clone in the deposit, using information from the sequences disclosed herein or the clones deposited with the ATCC. For example, allelic variants and/or species homologs may be isolated and identified by making suitable probes or primers from the sequences provided herein and screening a suitable nucleic acid source for allelic variants and/or the desired homologue.

[0067] The present invention provides a polynucleotide comprising, or alternatively consisting of, the nucleic acid sequence of SEQ ID NO:X, and/or the related cDNA clone (See, e.g., columns 1 and 9 of Table 1). The present invention also provides a polypeptide comprising, or alternatively, consisting of, the polypeptide sequence of SEQ ID NO:Y, a polypeptide encoded by SEQ ID NO:X, and/or a polypeptide encoded by the cDNA in the related cDNA clone contained in a deposited library. Polynucleotides encoding a polypeptide comprising, or alternatively consisting of, the polypeptide sequence of SEQ ID NO:Y, a polypeptide encoded by SEQ ID NO:X, and/or a polypeptide encoded by the the dDNA in the related cDNA clone contained in a deposited library, are also encompassed by the invention. The present invention further encompasses a polynucleotide comprising, or alternatively consisting of, the complement of the nucleic acid sequence of SEQ ID NO:X, and/or the complement of the coding strand of the related cDNA clone contained in a deposited library.

[0068] Many polynucleotide sequences, such as EST sequences, are publicly available and accessible through sequence databases and may have been publicly available prior to conception of the present invention. Preferably, such related polynucleotides are specifically excluded from the scope of the present invention. To list every related sequence would unduly burden the disclosure of this application. Accordingly, for each “Contig Id” listed in the first column of Table 3, preferably excluded are one or more polynucleotides comprising a nucleotide sequence described in the second column of Table 3 by the general formula of a-b, each of which are uniquely defined for the SEQ ID NO:X corresponding to that Contig Id in Table 1. Additionally, specific embodiments are directed to polynucleotide sequences excluding at least one, two, three, four, five, ten, or more of the specific polynucleotide sequences referenced by the Genbank Accession No. for each Contig Id which may be included in column 3 of Table 3. In no way is this listing meant to encompass all of the sequences which may be excluded by the general formula, it is just a representative example.

TABLE 3

| Sequence/ | | |
|---|---|---|
| Contig ID | General formula | Genbank Accession No. |
| 419266 | Preferably excluded from the present invention are one or | T68585, T68665, T86313, T86314, R12356, R31374, R32873, R37282, |
| | more polynucleotides comprising a nucleotide sequence | R84617, R85369, R99171, H48474, N23871, N58201, N74557, |
| | described by the general formula of a-b, where a is any | W90334, AA031318, AA031427, AA130231, AA256587 |
| | integer between 1 to 1899 of SEQ ID NO: 1, b is an integer | |
| | of 15 to 1913, where both a and b correspond to the | |
| | positions of nucleotide residues shown in SEQ ID NO: 1, | |
| | and where b is greater than or equal to a + 14. | |
| 429114 | Preferably excluded from the present invention are one or | 20542, R42676, R42676, R20542, R61501, H08662, H77556, H97365, |
| | more polynucleotides comprising a nucleotide sequence | 24198, N33 135, N74546, N93573, W02941, W52194, AA004624, |
| | described by the general formula of a-b, where a is any | AA004721, AA046710, AA235395, AA235479 |
| | integer between 1 to 1411 of SEQ ID NO: 2, b is an integer | |
| | of 15 to 1425, where both a and b correspond to the | |
| | positions of nucleotide residues shown in SEQ ID NO: 2, | |
| | and where b is greater than or equal to a + 14. | |
| 506777 | referably excluded from the present invention are one or | |
| | more polynucleotides comprising a nucleotide sequence | |
| | described by the general formula of a-b, where a is any | |
| | integer between 1 to 340 of SEQ ID NO: 3, b is an integer | |
| | of 15 to 354, where both a and b correspond to the positions | |
| | of nucleotide residues shown in SEQ ID NO: 3, and where b | |
| | is greater than or equal to a + 14. | |
| 508678 | Preferably excluded from the present invention are one or | 37175, AA121532, AA127694 |
| | more polynucleotides comprising a nucleotide sequence | |
| | described by the general formula of a-b, where a is any | |
| | integer between 1 to 500 of SEQ ID NO: 4, b is an integer | |
| | of 15 to 514, where both a and b correspond to the positions | |
| | of nucleotide residues shown in SEQ ID NO: 4, and where b | |
| | is greater than or equal to a + 14. | |
| 508968 | Preferably excluded from the present invention are one or | T71941, T94428, T94514, H02313, N26913, N47870, N66244, N92418, |
| | more polynucleotides comprising a nucleotide sequence | W31301, W42459, W42564, AA084031, AA126786, AA258050, |
| | described by the general formula of a-b, where a is any | AA459772 |
| | integer between 1 to 2021 of SEQ TD NO: 5, b is an integer | |
| | of 15 to 2035, where both a and b correspond to the | |
| | positions of nucleotide residues shown in SEQ ID NO: 5, | |
| | and where b is greater than or equal to a + 14. | |
| 509029 | Preferably excluded from the present invention are one or | R11213, R11271, H14072, H14071, H51531, H66637, H66636, |
| | more polynucleotides comprising a nucleotide sequence | 23707, W35307, AA025586, AA025710, AA058796, AA113917 |
| | described by the general formula of a-b, where a is any | |
| | integer between 1 to 1182 of SEQ ID NO: 6, b is an integer | |
| | of 15 to 1196, where both a and b correspond to the | |
| | positions of nucleotide residues shown in SEQ ID NO: 6, | |
| | and where b is greater than or equal to a + 14. | |
| 519726 | Preferably excluded from the present invention are one or | AA236015, AA236085, AA256106 |
| | more polynucleotides comprising a nucleotide sequence | |
| | described by the general formula of a-b, where a is any | |
| | integer between 1 to 610 of SEQ ID NO: 7, b is an integer | |
| | of 15 to 624, where both a and b correspond to the positions | |
| | of nucleotide residues shown in SEQ ID NO: 7, and where b | |
| | is greater than or equal to a + 14. | |
| 522632 | Preferably excluded from the present invention are one or | |
| | more polynucleotides comprising a nucleotide sequence | |
| | described by the general formula of a-b, where a is any | |
| | integer between 1 to 287 of SEQ lID NO: 8, b is an integer | |
| | of 15 to 301, where both a and b correspond to the positions | |
| | of nucleotide residues shown in SEQ ID NO: 8, and where b | |
| | is greater than or equal to a + 14. | |
| 524655 | Preferably excluded from the present invention are one or | T66495, R15869, R39696, H16266, H20784, H22599, N68150, |
| | more polynucleotides comprising a nucleotide sequence | W58001, W57856 |
| | described by the general formula of a-b, where a is any | |
| | integer between 1 to 672 of SEQ ID NO: 9, b is an integer | |
| | of 15 to 686, where both a and b correspond to the positions | |
| | of nucleotide residues shown in SEQ ID NO: 9, and where b | |
| | is greater than or equal to a + 14. | |
| 525847 | Preferably excluded from the present invention are one or | |
| | more polynucleotides comprising a nucleotide sequence | |
| | described by the general formula of a-b, where a is any | |
| | integer between 1 to 383 of SEQ ID NO: 10, b is an integer | |
| | of 15 to 397, where both a and b correspond to the positions | |
| | of nucleotide residues shown in SEQ ID NO: 10, and where | |
| | b is greater than or equal to a + 14. | |
| 530306 | Preferably excluded from the present invention are one or | |
| | more polynucleotides comprising a nucleotide sequence | |
| | described by the general formula of a-b, where a is any | |
| | integer between 1 to 549 of SEQ ID NO: 11, b is an integer | |
| | of 15 to 563, where both a and b correspond to the positions | |
| | of nucleotide residues shown in SEQ ID NO: 11, and where | |
| | b is greater than or equal to a + 14. | |
| 532818 | Preferably excluded from the present invention are one or | AA188990, AA191040 |
| | more polynucleotides comprising a nucleotide sequence | |
| | described by the general formula of a-b, where a is any | |
| | integer between 1 to 429 of SEQ ID NO: 12, b is an integer | |
| | of 15 to 443, where both a and b correspond to the positions | |
| | of nucleotide residues shown in SEQ ID NO: 12, and where | |
| | is greater than or equal to a + 14. | |
| 533385 | Preferably excluded from the present invention are one or | |
| | more polynucleotides comprising a nucleotide sequence | |
| | described by the general formula of a-b, where a is any | |
| | integer between 1 to 2424 of SEQ ID NO: 13, b is an integer | |
| | of 15 to 2438, where both a and b correspond to the | |
| | positions of nucleotide residues shown in SEQ ID NO: 13, | |
| | and where b is greater than or equal to a + 14. | |
| 533532 | Preferably excluded from the present invention are one or | T94240, T77619, R13236, R17515, R33142, R33294, R39249, R40318, |
| | more polynucleotides comprising a nucleotide sequence | R42609, R42609, R40318, R75952, H03594, H12337, H12391, 1170913, |
| | described by the general formula of a-b, where a is any | H70916, H70996, H71001, H87858, H70913, N21374, N31326, |
| | integer between 1 to 2333 of SEQ ID NO: 14, b is an integer | N35068, N35435, N43807, N45045, W46431, W46486, W51917, |
| | of 15 to 2347, where both a and b correspond to the | AA019546, AA018858, AA056764, AA056767, AA058441, |
| | positions of nucleotide residues shown in SEQ ID NO: 14, | AA058445, AA083228, AA083269, AA115939, AA122236, |
| | and where b is greater than or equal to a + 14. | AA147307, AA159802, AA165015, AA165642, AA181869, |
| | | AA186834, AA252269, AA255892, AA463239, AA463240 |
| 534852 | Preferably excluded from the present invention are one or | T55469, T63434, R10603, R10604, 1150597, H92640, 1194634, |
| | more polynucleotides comprising a nucleotide sequence | 39162, W93243, W94634, W94719, N90240, AA053667, AA1673 12, |
| | described by the general formula of a-b, where a is any | A2534 14, AA253389 |
| | integer between 1 to 1992 of SEQ ID NO: 15, b is an integer | |
| | of 15 to 2006, where both a and b correspond to the | |
| | positions of nucleotide residues shown in SEQ ID NO: 15, | |
| | and where b is greater than or equal to a + 14. | |
| 537910 | Preferably excluded from the present invention are one or | R23785 |
| | more polynucleotides comprising a nucleotide sequence | |
| | described by the general formula of a-b, where a is any | |
| | integer between 1 to 972 of SEQ ID NO: 16, b is an integer | |
| | of 15 to 986, where both a and b correspond to the positions | |
| | of nucleotide residues shown in SEQ ID NO: 16, and where | |
| | b is greater than or equal to a + 14. | |
| 538460 | Preferably excluded from the present invention are one or | R13084, R40514, R40514, R55303, R55402, W67446 |
| | more polynucleotides comprising a nucleotide sequence | |
| | described by the general formula of a-b, where a is any | |
| | integer between 1 to 1575 of SEQ ID NO: 17, b is an integer | |
| | of 15 to 1589, where both a and b correspond to the | |
| | positions of nucleotide residues shown in SEQ ID NO: 17, | |
| | and where b is greater than or equal to a + 14. | |
| 539577 | Preferably excluded from the present invention are one or | T49208, N35488, AA088419, AA127572, AA127649, AA156316, |
| | more polynucleotides comprising a nucleotide sequence | AA169250 |
| | described by the general formula of a-b, where a is any | |
| | integer between 1 to 832 of SEQ ID NO: 18, b is an integer | |
| | of 15 to 846, where both a and b correspond to the positions | |
| | of nucleotide residues shown in SEQ ID NO: 18, and where | |
| | b is greater than or equal to a + 14. | |
| 548379 | Preferably excluded from the present invention are one or | 23778, H70824 |
| | more polynucleotides comprising a nucleotide sequence | |
| | described by the general formula of a-b, where a is any | |
| | integer between 1 to 2178 of SEQ ID NO: 19, b is an integer | |
| | of 15 to 2192, where both a and b correspond to the | |
| | positions of nucleotide residues shown in SEQ ID NO: 19, | |
| | and where b is greater than or equal to a + 14. | |
| 548489 | Preferably excluded from the present invention are one or | 49861, T49862, T56225, T56367, T72170, T72948, T92867, T74728, |
| | more polynucleotides comprising a nucleotide sequence | R08625, R08719, R17408, R24674, R25174, R25378, R25997, R26800, |
| | described by the general formula of a-b, where a is any | R28401, R31330, R31589, R42642, R45259, R42642, R45259, R62552, |
| | integer between 1 to 997 of SEQ ID NO: 20, b is an integer | R62553, R66386, R67726, R68781, R68878, H25120, H25121, H41115, |
| | of 15 to 1011, where both a and b correspond to the | H41190, H41191, R84227, R87629, H53386, H64419, H64476, |
| | positions of nucleotide residues shown in SEQ ID NO: 20, | H72640, H72641, H64419, H99301, N22341, N25846, N29370, |
| | and where b is greater than or equal to a + 14. | N29843, N47918, N57261, N59763, N63813, N94171, W23786, |
| | | W45524, W72111, W77797, AA010718, AA011164, AA033553, |
| | | AA033554, AA062727, AA062741, AA062784, AA069811, |
| | | AA075470, AA075471, AA08 1844, AA083492, AA084442, |
| | | AA100358, AA126263, AA126354, AA136544, AA136648, |
| | | AA146862, AA146863, AA179509, AA179540, AA179775, |
| | | AA180492, AA181719, AA188903, AA189140, AA226959, AA227247 |
| 548595 | Preferably excluded from the present invention are one or | T61537, T69836, R10679, R42501, R46798, R42501, R46798, H05289, |
| | more polynucleotides comprising a nucleotide sequence | H05822, H12239, H168 16, H403 12, R86905, R86985, N21432, |
| | described by the general formula of a-b, where a is any | 73268, W73 102, N91565, AA033533, AA053026, AA121547, |
| | integer between 1 to 2005 of SEQ ID NO: 21, b is an integer | AA127684, AA190356, AA195451, AA226965, AA232522, AA258142 |
| | of 15 to 2019, where both a and b correspond to the | |
| | positions of nucleotide residues shown in SEQ ID NO: 21, | |
| | and where b is greater than or equal to a + 14. | |
| 549337 | Preferably excluded from the present invention are one or | |
| | more polynucleotides comprising a nucleotide sequence | |
| | described by the general formula of a-b, where a is any | |
| | integer between 1 to 2008 of SEQ ID NO: 22, b is an integer | |
| | of 15 to 2022, where both a and b correspond to the | |
| | positions of nucleotide residues shown in SEQ ID NO: 22, | |
| | and where b is greater than or equal to a + 14. | |
| 549777 | Preferably excluded from the present invention are one or | T81557, R27931, R38730, R39493, R39494, R66845, R67942, R69099, |
| | more polynucleotides comprising a nucleotide sequence | R69214, R696 13, R69703, R69740, R72430, R72478, R73090, R73091, |
| | described by the general formula of a-b, where a is any | R73872, R73955, R82662, R82715, H01096, H01097, H72113, N76139, |
| | integer between 1 to 1112 of SEQ lID NO: 23, b is an integer | W58493, W72884, W74409, W94644, W92532, AA0229 16, AA0229 17, |
| | of 15 to 1126, where both a and b correspond to the | AA039661, AA039660, AA043439, AA054965, AA152376, |
| | positions of nucleotide residues shown in SEQ ID NO: 23, | AA148360, AA18 1225, AA188435 |
| | and where b is greater than or equal to a + 14. | |
| 553091 | Preferably excluded from the present invention are one or | |
| | more polynucleotides comprising a nucleotide sequence | |
| | described by the general formula of a-b, where a is any | |
| | integer between 1 to 2584 of SEQ ID NO: 24, b is an integer | |
| | of 15 to 2598, where both a and b correspond to the | |
| | positions of nucleotide residues shown in SEQ ID NO: 24, | |
| | and where b is greater than or equal to a + 14. | |
| 553827 | Preferably excluded from the present invention are one or | |
| | more polynucleotides comprising a nucleotide sequence | |
| | described by the general formula of a-b, where a is any | |
| | integer between 1 to 397 of SEQ ID NO: 25, b is an integer | |
| | of 15 to 411, where both a and b correspond to the positions | |
| | of nucleotide residues shown in SEQ lID NO: 25, and where | |
| | b is greater than or equal to a + 14. | |
| 556350 | Preferably excluded from the present invention are one or | T70920, R01856, R37402, H21077, H21531, R94734, N29364, N32255, |
| | more polynucleotides comprising a nucleotide sequence | N80553, W07675, W58340, W58661, W67208, W67352, AA039658, |
| | described by the general formula of a-b, where a is any | AA039659, AA046392, AA055650, AA058365, AA070442, |
| | integer between 1 to 643 of SEQ ID NO: 26, b is an integer | AA088882, AA102056, AA134144, AA165363, AA171617, |
| | of 15 to 657, where both a and b correspond to the positions | AA17376l, AA173771, AA252260, AA464575, AA464679 |
| | of nucleotide residues shown in SEQ ID NO: 26, and where | |
| | b is greater than or equal to a + 14. | |
| 556351 | Preferably excluded from the present invention are one or | T70981, R01855, R13494, H21076, H24431, H24460, R94817, N47912, |
| | more polynucleotides comprising a nucleotide sequence | A040086, AA04O 133, AA055706, AA056 162, AA058484, |
| | described by the general formula of a-b, where a is any | AA102055, AA102304, AA130304, AA173608, AA195879 |
| | integer between 1 to 1889 of SEQ ID NO: 27, b is an integer | |
| | of 15 to 1903, where both a and b correspond to the | |
| | positions of nucleotide residues shown in SEQ ID NO: 27, | |
| | and where b is greater than or equal to a + 14. | |
| 557007 | Preferably excluded from the present invention are one or | H13846, H13894, H16354, H20742, H20743, R97935, R97936, |
| | more polynucleotides comprising a nucleotide sequence | H87445, N29633, AA015991, AA045671, AA045670, AA099154, |
| | described by the general formula of a-b, where a is any | AA099252 |
| | integer between I to 1319 of SEQ ID NO: 28, b is an integer | |
| | of 15 to 1333, where both a and b correspond to the | |
| | positions of nucleotide residues shown in SEQ ID NO: 28, | |
| | and where b is greater than or equal to a + 14. | |
| 558140 | Preferably excluded from the present invention are one or | T62991, W58535, W58500, AA053629, AA083878, AA112892, |
| | more polynucleotides comprising a nucleotide sequence | AA157250, AA157345, AA194089, AA253436, AA250750 |
| | described by the general formula of a-b, where a is any | |
| | integer between 1 to 1313 of SEQ ID NO: 29, b is an integer | |
| | of 15 to 1327, where both a and b correspond to the | |
| | positions of nucleotide residues shown in SEQ ID NO: 29, | |
| | and where b is greater than or equal to a + 14. | |
| 558456 | Preferably excluded from the present invention are one or | |
| | more polynucleotides comprising a nucleotide sequence | |
| | described by the general formula of a-b, where a is any | |
| | integer between 1 to 695 of SEQ lID NO: 30, b is an integer | |
| | of 15 to 709, where both a and b correspond to the positions | |
| | of nucleotide residues shown in SEQ ID NO: 30, and where | |
| | b is greater than or equal to a + 14. | |
| 558708 | Preferably excluded from the present invention are one or | R38385, W24640, W48793, W49619 |
| | more polynucleotides comprising a nucleotide sequence | |
| | described by the general formula of a-b, where a is any | |
| | integer between 1 to 1094 of SEQ ID NO: 31, b is an integer | |
| | of 15 to 1108, where both a and b correspond to the | |
| | positions of nucleotide residues shown in SEQ ID NO: 31, | |
| | and where b is greater than or equal to a + 14. | |
| 574789 | Preferably excluded from the present invention are one or | N49156 |
| | more polynucleotides comprising a nucleotide sequence | |
| | described by the general formula of a-b, where a is any | |
| | integer between 1 to 512 of SEQ ID NO: 32, b is an integer | |
| | of 15 to 526, where both a and b correspond to the positions | |
| | of nucleotide residues shown in SEQ ID NO: 32, and where | |
| | b is greater than or equal to a + 14. | |
| 578203 | Preferably excluded from the present invention are one or | AA149853 |
| | more polynucleotides comprising a nucleotide sequence | |
| | described by the general formula of a-b, where a is any | |
| | integer between 1 to 541 of SEQ ID NO: 33, b is an integer | |
| | of 15 to 555, where both a and b correspond to the positions | |
| | of nucleotide residues shown in SEQ ID NO: 33, and where | |
| | b is greater than or equal to a + 14. | |
| 585385 | Preferably excluded from the present invention are one or | |
| | more polynucleotides comprising a nucleotide sequence | |
| | described by the general formula of a-b, where a is any | |
| | integer between 1 to 333 of SEQ ID NO: 34, b is an integer | |
| | of 15 to 347, where both a and b correspond to the positions | |
| | of nucleotide residues shown in SEQ ID NO: 34, and where | |
| | is greater than or equal to a + 14. | |
| 588869 | Preferably excluded from the present invention are one or | |
| | more polynucleotides comprising a nucleotide sequence | |
| | described by the general formula of a-b, where a is any | |
| | integer between 1 to 736 of SEQ ID NO: 35, b is an integer | |
| | of 15 to 750, where both a and b correspond to the positions | |
| | of nucleotide residues shown in SEQ ID NO: 35, and where | |
| | b is greater than or equal to a + 14. | |
| 597076 | Preferably excluded from the present invention are one or | |
| | more polynucleotides comprising a nucleotide sequence | |
| | described by the general formula of a-b, where a is any | |
| | integer between 1 to 1277 of SEQ ID NO: 36, b is an integer | |
| | of 15 to 1291, where both a and b correspond to the | |
| | positions of nucleotide residues shown in SEQ ID NO: 36, | |
| | and where b is greater than or equal to a + 14. | |
| 598656 | Preferably excluded from the present invention are one or | |
| | more polynucleotides comprising a nucleotide sequence | |
| | described by the general formula of a-b, where a is any | |
| | integer between 1 to 1521 of SEQ ID NO: 37, b is an integer | |
| | of 15 to 1535, where both a and b correspond to the | |
| | positions of nucleotide residues shown in SEQ ID NO: 37, | |
| | and where b is greater than or equal to a + 14. | |
| 611880 | Preferably excluded from the present invention are one or | |
| | more polynucleotides comprising a nucleotide sequence | |
| | described by the general formula of a-b, where a is any | |
| | integer between 1 to 281 of SEQ ID NO: 38, b is an integer | |
| | of 15 to 295, where both a and b correspond to the positions | |
| | of nucleotide residues shown in SEQ ID NO: 38, and where | |
| | b is greater than or equal to a + 14. | |
| 614329 | Preferably excluded from the present invention are one or | T49777, T51334, T49778, T66835, T66836, T78401, R33579, R33684, |
| | more polynucleotides comprising a nucleotide sequence | R34361, R34476, R72556, R75702, H01591, 1102719, H13232, H13599, |
| | described by the general formula of a-b, where a is any | H13942, H13943, 1163376, 1180729, 1180730, H89353, 1189539, |
| | integer between 1 to 1286 of SEQ ID NO: 39, b is an integer | H99395, N26995, N32930, N40116, N42081, N50408, N50460, |
| | of 15 to 1300, where both a and b correspond to the | N63978, N67308, N92847, W46413, AA126994, AA128141, |
| | positions of nucleotide residues shown in SEQ ID NO: 39, | AA146958, AA146957, AA425764 |
| | and where b is greater than or equal to a + 14. | |
| 616066 | Preferably excluded from the present invention are one or | |
| | more polynucleotides comprising a nucleotide sequence | |
| | described by the general formula of a-b, where a is any | |
| | integer between 1 to 201 of SEQ ID NO: 40, b is an integer | |
| | of 15 to 215, where both a and b correspond to the positions | |
| | of nucleotide residues shown in SEQ ID NO: 40, and where | |
| | b is greater than or equal to a + 14. | |
| 620956 | Preferably excluded from the present invention are one or | |
| | more polynucleotides comprising a nucleotide sequence | |
| | described by the general formula of a-b, where a is any | |
| | integer between 1 to 460 of SEQ ID NO: 4 1, b is an integer | |
| | of 15 to 474, where both a and b correspond to the positions | |
| | of nucleotide residues shown in SEQ ID NO: 4 1, and where | |
| | is greater than or equal to a + 14. | |
| 621889 | Preferably excluded from the present invention are one or | |
| | more polynucleotides comprising a nucleotide sequence | |
| | described by the general formula of a-b, where a is any | |
| | integer between 1 to 411 of SEQ ID NO: 42, b is an integer | |
| | of 15 to 425, where both a and b correspond to the positions | |
| | of nucleotide residues shown in SEQ ID NO: 42, and where | |
| | b is greater than or equal to a + 14. | |
| 624017 | Preferably excluded from the present invention are one or | T61010, AA071044, AA088260, AA098798, AA102017, AA100707, |
| | more polynucleotides comprising a nucleotide sequence | AA111883, AA113305, AA121495, AA133235, AA131438, |
| | described by the general formula of a-b, where a is any | AA132011, AA132866, AA143457, AA146581, AA146805, |
| | integer between 1 to 1173 of SEQ ID NO: 43, b is an integer | AA146928, AA155613, AA155609, AA158090, AA158263, |
| | of 15 to 1187, where both a and b correspond to the | AA164694, AA165591, AA176429, AA226820 |
| | positions of nucleotide residues shown in SEQ ID NO: 43, | |
| | and where b is greater than or equal to a + 14. | |
| 651784 | Preferably excluded from the present invention are one or | W32583, W68240, W94174, AA25 1670, AA252011, AA252266, |
| | more polynucleotides comprising a nucleotide sequence | AA425209 |
| | described by the general formula of a-b, where a is any | |
| | integer between 1 to 501 of SEQ ID NO: 44, b is an integer | |
| | of 15 to 515, where both a and b correspond to the positions | |
| | of nucleotide residues shown in SEQ ID NO: 44, and where | |
| | is greater than or equal to a + 14. | |
| 651826 | Preferably excluded from the present invention are one or | T47384, T47385, T60137, T60194, T71947, T95050, T95 146, R25340, |
| | more polynucleotides comprising a nucleotide sequence | R25476, R26117, R26301, R27566, R27664, R28 180, R33393, R35 872, |
| | described by the general formula of a-b, where a is any | R35873, R36483, R48329, R48438, R62 139, R62244, R66007, R66008, |
| | integer between 1 to 1485 of SEQ ID NO: 45, b is an integer | R66764, R70718, R70719, R73674, R73761, R74132, R76569, R76643, |
| | of 15 to 1499, where both a and b correspond to the | R77265, R77312, R78827, R79686, R79687, R813 16, R81751, 1100804, |
| | positions of nucleotide residues shown in SEQ ID NO: 45, | H00891, H01415, H01416, 1102522, H03673, 1113925, H13926, |
| | and where b is greater than or equal to a + 14. | H24743, H26369, H26727, H26728, H27132, H27480, 1127663, |
| | | 28192, H28235, 1141929, 1141977, 1142604, 1143209, 1143258, |
| | | H45278, H45348, H53585, 1153906, H61785, H61786, 1178337, |
| | | H78338, H87337, 1187871, H95 183, N27090, N27092, N40499, |
| | | N40502, N99158, W24165, W60193, AA039817, AA041344, |
| | | AA074512, AA079058, AA079 156, AA079 157, AA085 829, |
| | | AA085974, AA100095, AA113304, AA142843, AA149898, |
| | | AA156331, AA157820, AA157895, AA158552, AA159177, |
| | | A176093, AA179607, AA179608, AA176333, AA187637, |
| | | A186769, AA188622, AA188742, AA188975 |
| 653282 | Preferably excluded from the present invention are one or | |
| | more polynucleotides comprising a nucleotide sequence | |
| | described by the general formula of a-b, where a is any | |
| | integer between 1 to 379 of SEQ ID NO: 46, b is an integer | |
| | of 15 to 393, where both a and b correspond to the positions | |
| | of nucleotide residues shown in SEQ ID NO: 46, and where | |
| | b is greater than or equal to a + 14. | |
| 657122 | Preferably excluded from the present invention are one or | |
| | more polynucleotides comprising a nucleotide sequence | |
| | described by the general formula of a-b, where a is any | |
| | integer between 1 to 224 of SEQ ID NO: 47, b is an integer | |
| | of 15 to 238, where both a and b correspond to the positions | |
| | of nucleotide residues shown in SEQ ID NO: 47, and where | |
| | b is greater than or equal to a + 14. | |
| 661442 | referably excluded from the present invention are one or | R18101, AA42472 I |
| | more polynucleotides comprising a nucleotide sequence | |
| | described by the general formula of a-b, where a is any | |
| | integer between 1 to 925 of SEQ ID NO: 48, b is an integer | |
| | of 15 to 939, where both a and b correspond to the positions | |
| | of nucleotide residues shown in SEQ ID NO: 48, and where | |
| | b is greater than or equal to a + 14. | |
| 664914 | Preferably excluded from the present invention are one or | T86944, T87027, R11421, T81153, T81380, R17243, R17453, R19171, |
| | more polynucleotides comprising a nucleotide sequence | R27826, R27927, R35295, R35940, R41854, R42800, R48191, R48 192, |
| | described by the general formula of a-b, where a is any | R49457, R5 1209, R52247, R53413, R41854, R42800, R49457, R55257, |
| | integer between 1 to 1757 of SEQ ID NO: 49, b is an integer | R55475, R59472, R71390, R81811, R81915, H05137, H07974, H30702, |
| | of 15 to 1771, where both a and b correspond to the | H42552, H57923, H58015, N71127, N74282, N75329, N93224, |
| | positions of nucleotide residues shown in SEQ ID NO: 49, | W01557, W04382, W04780, W23438, W35253, W38865, AA176204, |
| | and where b is greater than or equal to a + 14. | AA194869, AA199875, AA25 1414 |
| 666654 | Preferably excluded from the present invention are one or | |
| | more polynucleotides comprising a nucleotide sequence | |
| | described by the general formula of a-b, where a is any | |
| | integer between 1 to 383 of SEQ ID NO: 50, b is an integer | |
| | of 15 to 397, where both a and b correspond to the positions | |
| | of nucleotide residues shown in SEQ ID NO: 50, and where | |
| | b is greater than or equal to a + 14. | |
| 667084 | Preferably excluded from the present invention are one or | R71869, R71870, H22387, H27160, H46592, H61204, H62108, |
| | more polynucleotides comprising a nucleotide sequence | N25274, N944 10, AA026642, AA0691 88, AA069 189, AA076423, |
| | described by the general formula of a-b, where a is any | AA076388, AA076533, AA076540, AA122346, AA121039, |
| | integer between 1 to 1621 of SEQ ID NO: 51, b is an integer | AA12lO92, AA133121, AA143471, AA143470, AA143728, |
| | of 15 to 1635, where both a and b correspond to the | A156363, AA156404, AA158498, AA159190, AA159201, |
| | positions of nucleotide residues shown in SEQ ID NO: 51, | AA159286, AA160335, AA159837, AA159573, AA160367, |
| | and where b is greater than or equal to a + 14. | AA159548, AA160456, AA160697, AA160789, AA179329, |
| | | AA181540, AA182669, AA186881, AA186887, AA188535, |
| | | AA188540, AA190669, AA190973, AA191557, AA235457, |
| | | AA458511, AA418203 |
| 667380 | Preferably excluded from the present invention are one or | T87574, R10276, R10277, T79847, R49790, R49832, R59538, R59539, |
| | more polynucleotides comprising a nucleotide sequence | R86940, R87067, R87722, R98577, R98578, R99022, R99795, H72692, |
| | described by the general formula of a-b, where a is any | 93036, H93942, H93941, N54059, N62326, N64719, N66726, |
| | integer between 1 to 1766 of SEQ ID NO: 52, b is an integer | N73888, N74171, N91734, N93505, W02054, W03949, W04337, |
| | of 15 to 1780, where both a and b correspond to the | W21317, AA192562, AA192563, AA223984, AA224049 |
| | described by the general formula of a-b, where a is any | |
| | integer between 1 to 1475 of SEQ ID NO: 57, b is an integer | |
| | of 15 to 1489, where both a and b correspond to the | |
| | positions of nucleotide residues shown in SEQ ID NO: 57, | |
| | and where b is greater than or equal to a + 14. | |
| 677202 | Preferably excluded from the present invention are one or | T47486, T47487, T47666, T50413, T50493, T505 19, T51852, T53234, |
| | more polynucleotides comprising a nucleotide sequence T57067, T60776, T40856, T93579, T94432, T94435, T9639 1, R43542, | |
| | described by the general fonnula of a-b, where a is any | 43542, H216 18, H73240, H88867, H88868, H89 122, H88868, |
| | integer between 1 to 1269 of SEQ ID NO: 58, b is an integerH89l22, N21997, N22243, N22815, N45720, N48998, N52063, | |
| | of 15 to 1283, where both a and b correspond to the | 59239, N62103, N66419, N66708, N66782, N67139, N67283, |
| | positions of nucleotide residues shown in SEQ ID NO: 58, | 67447, N68047, N70159, N71198, N74676, N76707, N78333, |
| | and where b is greater than or equal to a + 14. | 80016, N92971, N935 18, W05738, W45694, W48845, W80602, |
| | | AA057801, AA063330, AA064827, AA065 165, AA065 178, |
| | | AA065179, AA069552, AA070491, AA070949, AA070969, |
| | | AA071333, AA071358, AA074331, AA081280, AA111928, |
| | | AA112051, AA132018, AA132121, AA147357, AA157065, |
| | | AA157085, AA157890, AA160054, AA18 1729, AA182765, |
| | | AA187698, AA186444, AA196168, AA196244, AA224187 |
| 678504 | Preferably excluded from the present invention are one or | |
| | more polynucleotides comprising a nucleotide sequence | |
| | described by the general formula of a-b, where a is any | |
| | integer between 1 to 726 of SEQ ID NO: 59, b is an integer | |
| | of 15 to 740, where both a and b correspond to the positions | |
| | of nucleotide residues shown in SEQ ID NO: 59, and where | |
| | b is greater than or equal to a + 14. | |
| 678985 | Preferably excluded from the present invention are one or | |
| | more polynucleotides comprising a nucleotide sequence | |
| | described by the general formula of a-b, where a is any | |
| | integer between 1 to 1277 of SEQ ID NO: 60, b is an integer | |
| | of 15 to 1291, where both a and b correspond to the | |
| | positions of nucleotide residues shown in SEQ ID NO: 60, | |
| | and where b is greater than or equal to a + 14. | |
| 682161 | Preferably excluded from the present invention are one or | |
| | more polynucleotides comprising a nucleotide sequence | |
| | described by the general formula of a-b, where a is any | |
| | integer between 1 to 957 of SEQ ID NO: 61, b is an integer | |
| | of 15 to 971, where both a and b correspond to the positions | |
| | of nucleotide residues shown in SEQ ID NO: 61, and where | |
| | is greater than or equal to a + 14. | |
| 683476 | Preferably excluded from the present invention are one or | |
| | more polynucleotides comprising a nucleotide sequence | |
| | described by the general formula of a-b, where a is any | |
| | integer between I to 604 of SEQ ID NO: 62, b is an integer | |
| | of 15 to 618, where both a and b correspond to the positions | |
| | of nucleotide residues shown in SEQ ID NO: 62, and where | |
| | b is greater than or equal to a + 14. | |
| 691146 | Preferably excluded from the present invention are one or | T48865, T48866, T48901, T47562, T48902, T54258, T54365, T69783, |
| | more polynucleotides comprising a nucleotide sequence | T70768, R08012, R09058, R09059, T83437, T84082, T99021, R09059, |
| | described by the general formula of a-b, where a is any | 19174, R21551, R22562, R28286, R48757, R48758, R49683, R49683, |
| | integer between 1 to 1124 of SEQ ID NO: 63, b is an integer | R62406, R62407, R70222, R75607, R77000, R78400, R78401, R80802, |
| | of 15 to 1138, where both a and b correspond to the | H02840, H03734, H24549, H26291, H26447, H279 12, H43630, |
| | positions of nucleotide residues shown in SEQ ID NO: 63, | H47817, R83903, R83904, R94147, H49533, H49773, H50716, H50820, |
| | and where b is greater than or equal to a + 14. | H87446, H87553, H93471, H93472, H98814, N22867, N32137, |
| | | N32762, N34334, N35009, N36932, N43763, N46205, N52251, |
| | | N56805, N72290, N95794, W02713, W02886, W17176, W24905, |
| | | W25571, W25688, W67795, W72687, W72962, W77793, W79704, |
| | | W81376, W86301, W863 16, AA0255 19, AA025959, AA026653, |
| | | AA029556, AA029704, AA079472, AA121306, AA136679, |
| | | AA148681, AA148680, AA18 1745, AA425923 |
| 693589 | Preferably excluded from the present invention are one or | |
| | more polynucleotides comprising a nucleotide sequence | |
| | described by the general formula of a-b, where a is any | |
| | integer between 1 to 404 of SEQ ID NO: 64, b is an integer | |
| | of 15 to 418, where both a and b correspond to the positions | |
| | of nucleotide residues shown in SEQ ID NO: 64, and where | |
| | b is greater than or equal to a + 14. | |
| 694991 | Preferably excluded from the present invention are one or | |
| | more polynucleotides comprising a nucleotide sequence | |
| | described by the general formula of a-b, where a is any | |
| | integer between 1 to 2822 of SEQ ID NO: 65, b is an integer | |
| | of 15 to 2836, where both a and b correspond to the | |
| | positions of nucleotide residues shown in SEQ ID NO: 65, | |
| | and where b is greater than or equal to a + 14. | |
| 698303 | Preferably excluded from the present invention are one or | T83582, T84417, T85606, R66380, R67111, R76298, H96019, H96020, |
| | more polynucleotides comprising a nucleotide sequence | N25659, N25661, N34260, N34263, N70618, W05500, W15421, |
| | described by the general formula of a-b, where a is any | W23670, W39659, AA015855, AA033569, AA033570, AA044566, |
| | integer between 1 to 2291 of SEQ ID NO: 66, b is an integer | AA044583, AA178933, AA179025 |
| | of 15 to 2305, where both a and b correspond to the | |
| | positions of nucleotide residues shown in SEQ ID NO: 66, | |
| | and where b is greater than or equal to a + 14. | |
| 698669 | Preferably excluded from the present invention are one or | T47115, T47116, R48786, R48893, R55495, R71847, R78934, R79033, |
| | more polynucleotides comprising a nucleotide sequence | R82776, H26587, H27077, R97760, H59232, H79115, H79116, |
| | described by the general formula of a-b, where a is any | N22948, N23658, N26858, N28757, N39967, N71599, W24648, |
| | integer between 1 to 1893 of SEQ ID NO: 67, b is an integer | W60157, W67490, W67491, W67815, W72921, W94215, AA009634, |
| | of 15 to 1907, where both a and b correspond to the | AA026899, AA026900, AA029244, AA029040, AA03 1846, |
| | positions of nucleotide residues shown in SEQ ID NO: 67, | AA03 1847, AA032073, AA034285, AA034992, AA036865, |
| | and where b is greater than or equal to a + 14. | AA037006, AA040908, AA039990, AA040521, AA040522, |
| | | AA040773, AA043726, AA044071, AA044182, AA042948, |
| | | AA043067, AA046606, AA046721, AA062914, AA074334, |
| | | AA076039, AA076203, AA079763, AA079764, AA082550, |
| | | AA085926, AA099318, AA099836, AA102385, AA101039, |
| | | A101040, AA112571, AA112572, AA114828, AA114951, |
| | | AA128001, AA128082, AA126986, AA128134, AA128459, |
| | | AA129910, AA131403, AA131503, AA147437, AA147438, |
| | | AA150961, AA151051, AA156785, AA156855, AA157912, |
| | | AA157913, AA158544, AA158545, AA158554, AA158553, |
| | | AA211822, AA460840, AA461144 |
| 705696 | Preferably excluded from the present invention are one or | H20141, H20156, H20236, 1120250, H49965, 1150007, 1150487, |
| | more polynucleotides comprising a nucleotide sequence | W92252, AA04S116, AA134141, AA142968 |
| | described by the general formula of a-b, where a is any | |
| | integer between 1 to 801 of SEQ ID NO: 68, b is an integer | |
| | of 15 to 815, where both a and b correspond to the positions | |
| | of nucleotide residues shown in SEQ ID NO: 68, and where | |
| | b is greater than or equal to a + 14. | |
| 706393 | Preferably excluded from the present invention are one or | T48975, T51242, T51357, T59673, T59807, T62725, T62875, T72330, |
| | more polynucleotides comprising a nucleotide sequence | T97577, ROl 168, R21893, R22365, R35745, R41863, R41863, R63676, |
| | described by the general formula of a-b, where a is any | R65881, R72862, R73334, R75659, R75767, H02871, 1103430, 1103512, |
| | integer between 1 to 1136 of SEQ ID NO: 69, b is an integer | Hl4924, H23660, 1130020, H30277, H39675, H40069, H40278, |
| | of 15 to 1150, where both a and b correspond to the | 1140526, H41667, 1141700, H43170, 1143670, H45130, 1145172, |
| | positions of nucleotide residues shown in SEQ ID NO: 69, | 45173, H45433, 1146542, H46952, H46953, 1162390, 1178695, |
| | and where b is greater than or equal to a + 14. H78777, H84781, H85405, 1192309, N20534, N33402, N38945, | |
| | | N57790, N57945, N59752, W94488, W94489, AA044423, AA043057, |
| | | AA081370, AA081371, AA099447, AA112623, AAI 12622, |
| | | AA143199, AA143214, AA149467, AA149553, AA157049, |
| | | A157201, AA157952, AA157953, AA158049, AA158435, |
| | | AA158837, AA158841, AA161074, AA161078, AA180395, |
| | | AA251447, AA419021, AA428783, AA429093 |
| 707357 | referably excluded from the present invention are one or | |
| | more polynucleotides comprising a nucleotide sequence | |
| | described by the general formula of a-b, where a is any | |
| | integer between 1 to 330 of SEQ ID NO: 70, b is an integer | |
| | of 15 to 344, where both a and b correspond to the positions | |
| | of nucleotide residues shown in SEQ ID NO: 70, and where | |
| | b is greater than or equal to a + 14. | |
| 707360 | Preferably excluded from the present invention are one or | |
| | more polynucleotides comprising a nucleotide sequence | |
| | described by the general formula of a-b, where a is any | |
| | integer between 1 to 434 of SEQ ID NO: 71, b is an integer | |
| | of 15 to 448, where both a and b correspond to the positions | |
| | of nucleotide residues shown in SEQ ID NO: 71, and where | |
| | is greater than or equal to a + 14. | |
| 707375 | Preferably excluded from the present invention are one or | T54138, T65139, T65330, T80324, T83140, R00512, R00612, R19513, |
| | more polynucleotides comprising a nucleotide sequence | R31469, R31470, R47795, R77921, R78022, R80012, H02327, H02429, |
| | described by the general formula of a-b, where a is any | H06404, H06405, H08607, H08608, H14264, H18370, H19266, |
| | integer between 1 to 2811 of SEQ lD NO: 72, b is an integer | H19267, H21399, H21471, H47094, H47185, R85467, R87496, R87501, |
| | of 15 to 2825, where both a and b correspond to the | R87581, R88189, R88226, R88227, N23376, N32357, N58463, N66212, |
| | positions of nucleotide residues shown in SEQ ID NO: 72, | N93661, N99 103, W19083, W24383, W68601, W68602, W68723, |
| | and where b is greater than or equal to a + 14. | W68745, AA016149, AA040296, AA056973, AA135439, AA1355 19, |
| | | A135580, AA135856, AA158858, AA161122, AA226730, |
| | | AA226764, AA227471, AA22748 1, AA23 2259 |
| 707754 | Preferably excluded from the present invention are one or | |
| | more polynucleotides comprising a nucleotide sequence | |
| | described by the general formula of a-b, where a is any | |
| | integer between 1 to 496 of SEQ ID NO: 73, b is an integer | |
| | of 15 to 510, where both a and b correspond to the positions | |
| | of nucleotide residues shown in SEQ ID NO: 73, and where | |
| | b is greater than or equal to a + 14. | |
| 711172 | Preferably excluded from the present invention are one or | |
| | more polynucleotides comprising a nucleotide sequence | |
| | described by the general formula of a-b, where a is any | |
| | integer between 1 to 444 of SEQ ID NO: 74, b is an integer | |
| | of 15 to 458, where both a and b correspond to the positions | |
| | of nucleotide residues shown in SEQ ID NO: 74, and where | |
| | b is greater than or equal to a + 14. | |
| 712248 | Preferably excluded from the present invention are one or | |
| | more polynucleotides comprising a nucleotide sequence | |
| | described by the general formula of a-b, where a is any | |
| | integer between 1 to 363 of SEQ ID NO: 75, b is an integer | |
| | of 15 to 377, where both a and b correspond to the positions | |
| | of nucleotide residues shown in SEQ ID NO: 75, and where | |
| | is greater than or equal to a + 14. | |
| 715445 | Preferably excluded from the present invention are one or | T88778, T97557, T97604, R17189, R27615, R30849, R41740, R48616, |
| | more polynucleotides comprising a nucleotide sequence | R41740, H12351, R93768, R98882, R98972, H59983, N23 156, N32736, |
| | described by the general formula of a-b, where a is any | N34539, N55086, N62785, N67224, N77297, N78823, N79734, |
| | integer between 1 to 2056 of SEQ ID NO: 76, b is an integer | W07252, W90651, AA037793, AA037794, AA055 196, AA055286, |
| | of 15 to 2070, where both a and b correspond to the | AA113425, AA233917, AA234165, AA258602, AA258548, |
| | positions of nucleotide residues shown in SEQ ID NO: 76, | A426581, AA429080 |
| | and where b is greater than or equal to a + 14. | |
| 716362 | Preferably excluded from the present invention are one or | |
| | more polynucleotides comprising a nucleotide sequence | |
| | described by the general formula of a-b, where a is any | |
| | integer between 1 to 983 of SEQ ID NO: 77, b is an integer | |
| | of 15 to 997, where both a and b correspond to the positions | |
| | of nucleotide residues shown in SEQ ID NO: 77, and where | |
| | b is greater than or equal to a + 14. | |
| 716835 | Preferably excluded from the present invention are one or | |
| | more polynucleotides comprising a nucleotide sequence | |
| | described by the general formula of a-b, where a is any | |
| | integer between 1 to 1319 of SEQ ID NO: 78, b is an integer | |
| | of 15 to 1333, where both a and b correspond to the | |
| | positions of nucleotide residues shown in SEQ ID NO: 78, | |
| | and where b is greater than or equal to a + 14. | |
| 716947 | Preferably excluded from the present invention are one or | |
| | more polynucleotides comprising a nucleotide sequence | |
| | described by the general formula of a-b, where a is any | |
| | integer between 1 to 546 of SEQ ID NO: 79, b is an integer | |
| | of 15 to 560, where both a and b correspond to the positions | |
| | of nucleotide residues shown in SEQ ID NO: 79, and where | |
| | is greater than or equal to a + 14. | |
| 717685 | Preferably excluded from the present invention are one or | T54040, N35800, W45088, AA122232, AAI21109, AA126030, |
| | more polynucleotides comprising a nucleotide sequence | AA126152, AA155618, AA155656 |
| | described by the general formula of a-b, where a is any | |
| | integer between I to 3189 of SEQ ID NO: 80, b is an integer | |
| | of 15 to 3203, where both a and b correspond to the | |
| | positions of nucleotide residues shown in SEQ ID NO: 80, | |
| | and where b is greater than or equal to a + 14. | |
| 719755 | Preferably excluded from the present invention are one or | |
| | more polynucleotides comprising a nucleotide sequence | |
| | described by the general formula of a-b, where a is any | |
| | integer between 1 to 1696 of SEQ ID NO: 81, b is an integer | |
| | of 15 to 1710, where both a and b correspond to the | |
| | positions of nucleotide residues shown in SEQ ID NO: 8 1, | |
| | and where b is greater than or equal to a + 14. | |
| 720389 | Preferably excluded from the present invention are one or | |
| | more polynucleotides comprising a nucleotide sequence | |
| | described by the general formula of a-b, where a is any | |
| | integer between 1 to 1365 of SEQ ID NO: 82, b is an integer | |
| | of 15 to 1379, where both a and b correspond to the | |
| | positions of nucleotide residues shown in SEQ ID NO: 82, | |
| | and where b is greater than or equal to a + 14. | |
| 720903 | Preferably excluded from the present invention are one or | |
| | more polynucleotides comprising a nucleotide sequence | |
| | described by the general formula of a-b, where a is any | |
| | integer between 1 to 664 of SEQ ID NO: 83, b is an integer | |
| | of 15 to 678, where both a and b correspond to the positions | |
| | of nucleotide residues shown in SEQ ID NO: 83, and where | |
| | b is greater than or equal to a + 14. | |
| 721348 | Preferably excluded from the present invention are one or | |
| | more polynucleotides comprising a nucleotide sequence | |
| | described by the general formula of a-b, where a is any | |
| | integer between 1 to 2789 of SEQ ID NO: 84, b is an integer | |
| | of 15 to 2803, where both a and b correspond to the | |
| | positions of nucleotide residues shown in SEQ ID NO: 84, | |
| | and where b is greater than or equal to a + 14. | |
| 721562 | Preferably excluded from the present invention are one or | |
| | more polynucleotides comprising a nucleotide sequence | |
| | described by the general formula of a-b, where a is any | |
| | integer between 1 to 1264 of SEQ ID NO: 85, b is an integer | |
| | of 15 to 1278, where both a and b correspond to the | |
| | positions of nucleotide residues shown in SEQ ID NO: 85, | |
| | and where b is greater than or equal to a + 14. | |
| 722775 | Preferably excluded from the present invention are one or | |
| | more polynucleotides comprising a nucleotide sequence | |
| | described by the general formula of a-b, where a is any | |
| | integer between 1 to 2571 of SEQ ID NO: 86, b is an integer | |
| | of 15 to 2585, where both a and b correspond to the | |
| | positions of nucleotide residues shown in SEQ ID NO: 86, | |
| | and where b is greater than or equal to a + 14. | |
| 724463 | Preferably excluded from the present invention are one or | |
| | more polynucleotides comprising a nucleotide sequence | |
| | described by the general formula of a-b, where a is any | |
| | integer between 1 to 371 of SEQ ID NO: 87, b is an integer | |
| | of 15 to 385, where both a and b correspond to the positions | |
| | of nucleotide residues shown in SEQ 119 NO: 87, and where | |
| | b is greater than or equal to a + 14. | |
| 727501 | Preferably excluded from the present invention are one or | |
| | more polynucleotides comprising a nucleotide sequence | |
| | described by the general formula of a-b, where a is any | |
| | integer between 1 to 2486 of SEQ ID NO: 88, b is an integer | |
| | of 15 to 2500, where both a and b correspond to the | |
| | positions of nucleotide residues shown in SEQ ID NO: 88, | |
| | and where b is greater than or equal to a + 14. | |
| 728418 | Preferably excluded from the present invention are one or | |
| | more polynucleotides comprising a nucleotide sequence | |
| | described by the general formula of a-b, where a is any | |
| | integer between 1 to 1395 of SEQ ID NO: 89, b is an integer | |
| | of 15 to 1409, where both a and b correspond to the | |
| | positions of nucleotide residues shown in SEQ ID NO: 89, | |
| | and where b is greater than or equal to a + 14. | |
| 728920 | Preferably excluded from the present invention are one or | |
| | more polynucleotides comprising a nucleotide sequence | |
| | described by the general formula of a-b, where a is any | |
| | integer between 1 to 1322 of SEQ ID NO: 90, b is an integer | |
| | of 15 to 1336, where both a and b correspond to the | |
| | positions of nucleotide residues shown in SEQ ID NO: 90, | |
| | and where b is greater than or equal to a + 14. | |
| 732958 | Preferably excluded from the present invention are one or | |
| | more polynucleotides comprising a nucleotide sequence | |
| | described by the general formula of a-b, where a is any | |
| | integer between 1 to 773 of SEQ ID NO: 91, b is an integer | |
| | of 15 to 787, where both a and b correspond to the positions | |
| | of nucleotide residues shown in SEQ ID NO: 9 1, and where | |
| | b is greater than or equal to a + 14. | |
| 733134 | Preferably excluded from the present invention are one or | T49547, T49558, T49559, T49560, T49561, T49649, T49650, T70062, |
| | more polynucleotides comprising a nucleotide sequence | T70129, T75532, T95 137, R17573, T27052, R19790, R429 12, R52618, |
| | described by the general formula of a-b, where a is any | R53272, R429 12, R59922, R59923, R65930, 1108 841, 1108925, H47546, |
| | integer between 1 to 1643 of SEQ ID NO: 92, b is an integer | H47s47, H47774, H47784, 1148119, H64949, 1164950, H69959, |
| | of 15 to 1657, where both a and b correspond to the | H69960, H80517, 1180569, 1181281, H81337, 1187618, 1187619, |
| | positions of nucleotide residues shown in SEQ ID NO: 92, | H88959, 1189042, H95657, H95712, H95729, H88959, H98860, |
| | and where b is greater than or equal to a + 14. | 20108, N23582, N27446, N34733, N49675, N51841, N755 17, |
| | | N78965, N93975, W053 10, W17334, W40344, W52084, W52929, |
| | | N72818, W728 19, W86046, W92307, W92294, AA009783, AA009892, |
| | | AA022930, AA022980, AA024699, AA024734, AA037408, |
| | | AA045887, AA045888, AA062821, AA081026, AA082088, |
| | | AA082420, AA102801, AA199861, AA199931, AA220961, |
| | | AA223217, AA223456, AA224153, AA224177, AA224137, |
| | | AA224138, AA224341, AA232349, AA232533, AA232117, |
| | | A458900, AA459095, AA463299 |
| 734099 | Preferably excluded from the present invention are one or | R22895, H87448 |
| | more polynucleotides comprising a nucleotide sequence | |
| | described by the general formula of a-b, where a is any | |
| | integer between 1 to 471 of SEQ ID NO: 93, b is an integer | |
| | of 15 to 485, where both a and b correspond to the positions | |
| | of nucleotide residues shown in SEQ ID NO: 93, and where | |
| | b is greater than or equal to a + 14. | |
| 734599 | Preferably excluded from the present invention are one or | |
| | more polynucleotides comprising a nucleotide sequence | |
| | described by the general formula of a-b, where a is any | |
| | integer between 1 to 750 of SEQ ID NO: 94, b is an integer | |
| | of 15 to 764, where both a and b correspond to the positions | |
| | of nucleotide residues shown in SEQ ID NO: 94, and where | |
| | b is greater than or equal to a + 14. | |
| 736019 | Preferably excluded from the present invention are one or | T41219, T50359, T56829, T58426, T58458, T60928, T60984, T64158, |
| | more polynucleotides comprising a nucleotide sequence | T64287, R27157, H03484, H03579, H22546, H22547, H283 10, H44067, |
| | described by the general formula of a-b, where a is any | H44146, R83796, H48481, H48645, H57243, H66162, H66163, |
| | integer between 1 to 693 of SEQ ID NO: 95, b is an integer | H82370, N21110, N21188, N27461, N29155, N29743, N31124, |
| | of 15 to 707, where both a and b correspond to the positions | N32398, N39884, N568 18, N57165, N57228, N57403, N68904, |
| | of nucleotide residues shown in SEQ ID NO: 95, and where | N73978, N77833, N93027, N938 18, N67112, W00894, W00923, |
| | b is greater than or equal to a + 14. | W02234, W16676, W21379, W44969, AA064843, AA070697, |
| | | AA070876, AA071332, AA071265, AA076379, AA076308, |
| | | AA079524, AA079572, AA081231, AA081401, AA083774, |
| | | AA083775, AA130308, AA130309, AA132056, AA132160, |
| | | AA143132, AA146882, AA146883, AA165057, AA164722, |
| | | AA166939, AA181133, AA187371, AA187804, AA188118, |
| | | A186447, AA186448, AA187105, AA187150, AA188273 |
| 738268 | Preferably excluded from the present invention are one or | T48287, T48288, T54477, T54511, R34064, R36907, R49496, R49496, |
| | more polynucleotides comprising a nucleotide sequence | R75625, R75724, H12225, H16384, H19466, H19543, H42166, |
| | described by the general formula of a-b, where a is any | H42988, H54780, H99297, N22733, N26471, N74933, N93468, |
| | integer between 1 to 801 of SEQ ID NO: 96, b is an integer | W15461, W47542, W47590, N90997, AA01O700, AA01O7O1, |
| | of 15 to 815, where both a and b correspond to the positions | AA056728, AA088699, AA126219, AA132934, AA156291, |
| | of nucleotide residues shown in SEQ ID NO: 96, and where | AA1655 16, AA165558, AA176293, AA173448, AA189056, |
| | b is greater than or equal to a + 14. | A233515, AA459831, AA460011 |
| 738911 | Preferably excluded from the present invention are one or | H22593, H52836 |
| | more polynucleotides comprising a nucleotide sequence | |
| | described by the general formula of a-b, where a is any | |
| | integer between 1 to 644 of SEQ ID NO: 97, b is an integer | |
| | of 15 to 658, where both a and b correspond to the positions | |
| | of nucleotide residues shown in SEQ ID NO: 97, and where | |
| | is greater than or equal to a + 14. | |
| 739226 | Preferably excluded from the present invention are one or | T57824, N63155, AA027845 |
| | more polynucleotides comprising a nucleotide sequence | |
| | described by the general formula of a-b, where a is any | |
| | integer between 1 to 235 of SEQ ID NO: 98, b is an integer | |
| | of 15 to 249, where both a and b correspond to the positions | |
| | of nucleotide residues shown in SEQ ID NO: 98, and where | |
| | b is greater than or equal to a + 14. | |
| 739527 | Preferably excluded from the present invention are one or | |
| | more polynucleotides comprising a nucleotide sequence | |
| | described by the general formula of a-b, where a is any | |
| | integer between 1 to 738 of SEQ ID NO: 99, b is an integer | |
| | of 15 to 752, where both a and b correspond to the positions | |
| | of nucleotide residues shown in SEQ ID NO: 99, and where | |
| | is greater than or equal to a + 14. | |
| 740710 | Preferably excluded from the present invention are one or | |
| | more polynucleotides comprising a nucleotide sequence | |
| | described by the general formula of a-b, where a is any | |
| | integer between 1 to 3045 of SEQ ID NO: 100, b is an | |
| | integer of 15 to 3059, where both a and b correspond to the | |
| | positions of nucleotide residues shown in SEQ ID NO: 100, | |
| | and where b is greater than or equal to a + 14. | |
| 742980 | Preferably excluded from the present invention are one or | T71993, R12901, R40053, H14591, H14696, R83485, H50584, H50585, |
| | more polynucleotides comprising a nucleotide sequence | N89958, H89966, H89973, H89980, N26005, N34777, N36638, |
| | described by the general formula of a-b, where a is any | N36637, N44503, N67682, N76121, N79613, W03491, W05571, |
| | integer between 1 to 1668 of SEQ ID NO: 101, b is an | W31276, W49653, W49727, AA009708, AA009798, AA035612, |
| | integer of 15 to 1682, where both a and b correspond to the | AA042894, AA043030, AA062953, AA115370, AA133278, |
| | positions of nucleotide residues shown in SEQ ID NO: 101, | A181268, AA181269, AA193206 |
| | and where b is greater than or equal to a + 14. | |
| 744331 | Preferably excluded from the present invention are one or | R25354, R49789, R71735, R71740, H73502, H79224, H87423, H99515, |
| | more polynucleotides comprising a nucleotide sequence | H99516, N24751, N32707, N44511, N52325, N67764, N75095, |
| | described by the general formula of a-b, where a is any | N93879, W40372, W69 127, W69094, W74698, W74736, AA026984, |
| | integer between 1 to 924 of SEQ ID NO: 102, b is an integer | AA035176, AA149088, AA262739, AA464357, AA430724 |
| | of 15 to 938, where both a and b correspond to the positions | |
| | of nucleotide residues shown in SEQ ID NO: 102, and | |
| | where b is greater than or equal to a + 14. | |
| 744751 | Preferably excluded from the present invention are one or | |
| | more polynucleotides comprising a nucleotide sequence | |
| | described by the general formula of a-b, where a is any | |
| | integer between 1 to 1998 of SEQ ID NO: 103, b is an | |
| | integer of 15 to 2012, where both a and b correspond to the | |
| | positions of nucleotide residues shown in SEQ ID NO: 103, | |
| | and where b is greater than or equal to a + 14. | |
| 745750 | Preferably excluded from the present invention are one or | |
| | more polynucleotides comprising a nucleotide sequence | |
| | described by the general formula of a-b, where a is any | |
| | integer between 1 to 1080 of SEQ ID NO: 104, b is an | |
| | integer of 15 to 1094, where both a and b correspond to the | |
| | positions of nucleotide residues shown in SEQ ID NO: 104, | |
| | and where b is greater than or equal to a + 14. | |
| 746285 | Preferably excluded from the present invention are one or | T87719, T87928, R99975, R99976, H64714, H65205, H92423, H65205, |
| | more polynucleotides comprising a nucleotide sequence | N47296, N48612, N58085, N58926, N64294, N64508, N72401, |
| | described by the general formula of a-b, where a is any | N80294, N93405, W04791, W21447, W94582, W953 17, AA024856, |
| | integer between 1 to 2283 of SEQ ID NO: 105, b is an | AA024939, AA037672, AA037673, AA070416, AA075508, |
| | integer of 15 to 2297, where both a and b correspond to the | AA075507, AA101263, AA148029, AA147953, AA169726, |
| | positions of nucleotide residues shown in SEQ ID NO: 105, | AA171461, AA173095, AA464821 |
| | and where b is greater than or equal to a + 14. | |
| 746416 | Preferably excluded from the present invention are one or | |
| | more polynucleotides comprising a nucleotide sequence | |
| | described by the general formula of a-b, where a is any | |
| | integer between 1 to 428 of SEQ ID NO: 106, b is an integer | |
| | of 15 to 442, where both a and b correspond to the positions | |
| | of nucleotide residues shown in SEQ ID NO: 106, and | |
| | where b is greater than or equal to a + 14. | |
| 747851 | Preferably excluded from the present invention are one or | N44767, W44754 |
| | more polynucleotides comprising a nucleotide sequence | |
| | described by the general formula of a-b, where a is any | |
| | integer between 1 to 1005 of SEQ ID NO: 107, b is an | |
| | integer of 15 to 1019, where both a and b correspond to the | |
| | positions of nucleotide residues shown in SEQ ID NO: 107, | |
| | and where b is greater than or equal to a + 14. | |
| 750632 | Preferably excluded from the present invention are one or | H48882, W23677, W35110, AA133857 |
| | more polynucleotides comprising a nucleotide sequence | |
| | described by the general formula of a-b, where a is any | |
| | integer between 1 to 697 of SEQ ID NO: 108, b is an integer | |
| | of 15 to 711, where both a and b correspond to the positions | |
| | of nucleotide residues shown in SEQ ID NO: 108, and | |
| | where b is greater than or equal to a + 14. | |
| 751315 | Preferably excluded from the present invention are one or | |
| | more polynucleotides comprising a nucleotide sequence | |
| | described by the general formula of a-b, where a is any | |
| | integer between 1 to 729 of SEQ ID NO: 109, b is an integer | |
| | of 15 to 743, where both a and b correspond to the positions | |
| | of nucleotide residues shown in SEQ ID NO: 109, and | |
| | where b is greater than or equal to a + 14. | |
| 754009 | Preferably excluded from the present invention are one or | |
| | more polynucleotides comprising a nucleotide sequence | |
| | described by the general formula of a-b, where a is any | |
| | integer between 1 to 781 of SEQ ID NO: 110, b is an integer | |
| | of 15 to 795, where both a and b correspond to the positions | |
| | of nucleotide residues shown in SEQ ID NO: 110, and | |
| | where b is greater than or equal to a + 14. | |
| 754634 | Preferably excluded from the present invention are one or | N21429 |
| | more polynucleotides comprising a nucleotide sequence | |
| | described by the general formula of a-b, where a is any | |
| | integer between 1 to 1318 of SEQ ID NO: 111, b is an | |
| | integer of 15 to 1332, where both a and b correspond to the | |
| | positions of nucleotide residues shown in SEQ ID NO: 111, | |
| | and where b is greater than or equal to a + 14. | |
| 756637 | Preferably excluded from the present invention are one or | N44651, W76461 |
| | more polynucleotides comprising a nucleotide sequence | |
| | described by the general formula of a-b, where a is any | |
| | integer between 1 to 729 of SEQ ID NO: 112, b is an integer | |
| | of 15 to 743, where both a and b correspond to the positions | |
| | of nucleotide residues shown in SEQ ID NO: 112, and | |
| | where b is greater than or equal to a + 14. | |
| 756833 | Preferably excluded from the present invention are one or | |
| | more polynucleotides comprising a nucleotide sequence | |
| | described by the general formula of a-b, where a is any | |
| | integer between 1 to 1676 of SEQ ID NO: 113, b is an | |
| | integer of 15 to 1690, where both a and b correspond to the | |
| | positions of nucleotide residues shown in SEQ ID NO: 113, | |
| | and where b is greater than or equal to a + 14. | |
| 756878 | Preferably excluded from the present invention are one or | R12122 |
| | more polynucleotides comprising a nucleotide sequence | |
| | described by the general formula of a-b, where a is any | |
| | integer between 1 to 606 of SEQ ID NO: 114, b is an integer | |
| | of 15 to 620, where both a and b correspond to the positions | |
| | of nucleotide residues shown in SEQ ID NO: 114, and | |
| | where b is greater than or equal to a + 14. | |
| 757332 | Preferably excluded from the present invention are one or | |
| | more polynucleotides comprising a nucleotide sequence | |
| | described by the general formula of a-b, where a is any | |
| | integer between I to 528 of SEQ ID NO: 115, b is an integer | |
| | of 15 to 542, where both a and b correspond to the positions | |
| | of nucleotide residues shown in SEQ ID NO: 115, and | |
| | where b is greater than or equal to a + 14. | |
| 760835 | Preferably excluded from the present invention are one or | |
| | more polynucleotides comprising a nucleotide sequence | |
| | described by the general formula of a-b, where a is any | |
| | integer between 1 to 511 of SEQ ID NO: 116, b is an integer | |
| | of 15 to 525, where both a and b correspond to the positions | |
| | of nucleotide residues shown in SEQ ID NO: 116, and | |
| | where b is greater than or equal to a + 14. | |
| 761760 | Preferably excluded from the present invention are one or | |
| | more polynucleotides comprising a nucleotide sequence | |
| | described by the general formula of a-b, where a is any | |
| | integer between 1 to 714 of SEQ ID NO: 117, b is an integer | |
| | of 15 to 728, where both a and b correspond to the positions | |
| | of nucleotide residues shown in SEQ ID NO: 117, and | |
| | where b is greater than or equal to a + 14. | |
| 762520 | Preferably excluded from the present invention are one or | T86617, T86618, R47814, R49961, R71921, R71968, 1128225, H28275, |
| | more polynucleotides comprising a nucleotide sequence | R94939, R95025, R97173, R97174, R99726, R99904, H52435, 1152436, |
| | described by the general formula of a-b, where a is any | H58879, H58880, H66345, 1166395, 1180709, H80710, W87663, |
| | integer between 1 to 934 of SEQ ID NO: 118, b is an integer | W87664, AA046620, AA046867, AA055456, AA102380, AA1213 14, |
| | of 15 to 948, where both a and b correspond to the positions | AA150579, AA197300 |
| | of nucleotide residues shown in SEQ ID NO: 118, and | |
| | where b is greater than or equal to a + 14. | |
| 764461 | Preferably excluded from the present invention are one or | |
| | more polynucleotides comprising a nucleotide sequence | |
| | described by the general formula of a-b, where a is any | |
| | integer between 1 to 197 of SEQ ID NO: 119, b is an integer | |
| | of 15 to 211, where both a and b correspond to the positions | |
| | of nucleotide residues shown in SEQ JD NO: 119, and | |
| | where b is greater than or equal to a + 14. | |
| 764517 | Preferably excluded from the present invention are one or | |
| | more polynucleotides comprising a nucleotide sequence | |
| | described by the general formula of a-b, where a is any | |
| | integer between 1 to 1294 of SEQ ID NO: 120, b is an | |
| | integer of 15 to 1308, where both a and b correspond to the | |
| | positions of nucleotide residues shown in SEQ ID NO: 120, | |
| | and where b is greater than or equal to a + 14. | |
| 765132 | Preferably excluded from the present invention are one or | |
| | more polynucleotides comprising a nucleotide sequence | |
| | described by the general formula of a-b, where a is any | |
| | integer between 1 to 2502 of SEQ ID NO: 121, b is an | |
| | integer of 15 to 2516, where both a and b correspond to the | |
| | positions of nucleotide residues shown in SEQ ID NO: 121, | |
| | and where b is greater than or equal to a + 14. | |
| 765667 | Preferably excluded from the present invention are one or | T81691, N27595 |
| | more polynucleotides comprising a nucleotide sequence | |
| | described by the general formula of a-b, where a is any | |
| | integer between 1 to 1125 of SEQ ID NO: 122, b is an | |
| | integer of 15 to 1139, where both a and b correspond to the | |
| | positions of nucleotide residues shown in SEQ ID NO: 122, | |
| | and where b is greater than or equal to a + 14. | |
| 767113 | Preferably excluded from the present invention are one or | |
| | more polynucleotides comprising a nucleotide sequence | |
| | described by the general formula of a-b, where a is any | |
| | integer between 1 to 2100 of SEQ ID NO: 123, b is an | |
| | integer of 15 to 2114, where both a and b correspond to the | |
| | positions of nucleotide residues shown in SEQ ID NO: 123, | |
| | and where b is greater than or equal to a + 14. | |
| 767204 | Preferably excluded from the present invention are one or | |
| | more polynucleotides comprising a nucleotide sequence | |
| | described by the general formula of a-b, where a is any | |
| | integer between 1 to 569 of SEQ ID NO: 124, b is an integer | |
| | of 15 to 583, where both a and b correspond to the positions | |
| | of nucleotide residues shown in SEQ ID NO: 124, and | |
| | where b is greater than or equal to a + 14. | |
| 767400 | Preferably excluded from the present invention are one or | |
| | more polynucleotides comprising a nucleotide sequence | |
| | described by the general formula of a-b, where a is any | |
| | integer between 1 to 1973 of SEQ ID NO: 125, b is an | |
| | integer of 15 to 1987, where both a and b correspond to the | |
| | positions of nucleotide residues shown in SEQ ID NO: 125, | |
| | and where b is greater than or equal to a + 14. | |
| 767962 | Preferably excluded from the present invention are one or | T59753, R21255, R21256, R23274, R23364, R71913, R71956, H12633, |
| | more polynucleotides comprising a nucleotide sequence | H12686, H99087, N26954, N335 18, N43798, N62998, N66835, |
| | described by the general formula of a-b, where a is any | N71124, N71156, N74144, N79907, W01554, W05537, W19994, |
| | integer between 1 to 1437 of SEQ ID NO: 126, b is an | W44368, W46357, W46193, W47163, W47284, W52537, W55854, |
| | integer of 15 to 1451, where both a and b correspond to the | W80804, W80878, W92021, W92022, N90420, AA002178, AA022578, |
| | positions of nucleotide residues shown in SEQ ID NO: 126, | AA022579, AA029899, AA029987, AA034181, AA036856, |
| | and where b is greater than or equal to a + 14. | AA036913, AA043237, AA043566, AA071518, AA082340, |
| | | AA122159, AA120962, AA146944, AA147449, AA148081, |
| | | AA151266, AA151267, AA156459 |
| 768040 | Preferably excluded from the present invention are one or | |
| | more polynucleotides comprising a nucleotide sequence | |
| | described by the general formula of a-b, where a is any | |
| | integer between 1 to 1220 of SEQ ID NO: 127, b is an | |
| | integer of 15 to 1234, where both a and b correspond to the | |
| | positions of nucleotide residues shown in SEQ ID NO: 127, | |
| | and where b is greater than or equal to a + 14. | |
| 769956 | Preferably excluded from the present invention are one or | R68817, R68925, R75906, H14626, H82146, H93 109, H93237, N32098, |
| | more polynucleotides comprising a nucleotide sequence | N35721, N45410, N75570, W03043, W04850, AA029607, AA262861, |
| | described by the general formula of a-b, where a is any | A463956, AA464092 |
| | integer between 1 to 849 of SEQ ID NO: 128, b is an integer | |
| | of 15 to 863, where both a and b correspond to the positions | |
| | of nucleotide residues shown in SEQ ID NO: 128, and | |
| | where b is greater than or equal to a + 14. | |
| 770133 | Preferably excluded from the present invention are one or | |
| | more polynucleotides comprising a nucleotide sequence | |
| | described by the general formula of a-b, where a is any | |
| | integer between 1 to 1224 of SEQ ID NO: 129, b is an | |
| | integer of 15 to 1238, where both a and b correspond to the | |
| | positions of nucleotide residues shown in SEQ ID NO: 129, | |
| | and where b is greater than or equal to a + 14. | |
| 770289 | Preferably excluded from the present invention are one or | |
| | more polynucleotides comprising a nucleotide sequence | |
| | described by the general formula of a-b, where a is any | |
| | integer between 1 to 365 of SEQ ID NO: 130, b is an integer | |
| | of 15 to 379, where both a and b correspond to the positions | |
| | of nucleotide residues shown in SEQ ID NO: 130, and | |
| | where b is greater than or equal to a + 14. | |
| 771964 | Preferably excluded from the present invention are one or | T53984, T55243, T51230, T77632, T91326, T80819, T81219, T84909, |
| | more polynucleotides comprising a nucleotide sequence | T95454, T97320, T99226, T99269, R16575, R16634, R19765, R22987, |
| | described by the general formula of a-b, where a is any | R23096, R33095, R33188, R37437, R39255, R45185, R45 185, R62594, |
| | integer between 1 to 1772 of SEQ ID NO: 131, b is an | R62642, H03891, H03892, H08679, 1108680, H20556, H20650, |
| | integer of 15 to 1786, where both a and b correspond to the | H46154, H46155, R88298, R90733, R90759, R92224, R92332, R97325, |
| | positions of nucleotide residues shown in SEQ ID NO: 131, | H57663, H58503, H61709, H61913, H62747, H66685, 1168924, |
| | and where b is greater than or equal to a + 14. | H68954, 1180053, H83342, 1195786, H96 135, N20464, N20472, |
| | | N24026, N25491, N35235, N354 19, N38769, N44900, N48399, |
| | | N5 146, N55089, N55095, N57767, N58580, N59732, N63942, |
| | | N70290, N71759, N74938, N77300, N98411, W23555, W52690, |
| | | W52160, W56557, W56635, W56598, W56594, W73408, W74230, |
| | | W79843, W93916, AA031492, AA070868, AA071019, AA088788, |
| | | AA100685, AA112926, AA176829, AA176851, AA193034, |
| | | AA194065, AA194180, AA194579, AA194703, AA195416, |
| | | AA195532, AA233792, AA233783, AA233900, AA233920, |
| | | AA234128, AA234169, AA252704, AA252831, AA416743, |
| | | AA418391, AA418440 |
| 772582 | Preferably excluded from the present invention are one or | |
| | more polynucleotides comprising a nucleotide sequence | |
| | described by the general formula of a-b, where a is any | |
| | integer between 1 to 960 of SEQ ID NO: 132, b is an integer | |
| | of 15 to 974, where both a and b correspond to the positions | |
| | of nucleotide residues shown in SEQ ID NO: 132, and | |
| | where b is greater than or equal to a + 14. | |
| 773387 | Preferably excluded from the present invention are one or | |
| | more polynucleotides comprising a nucleotide sequence | |
| | described by the general formula of a-b, where a is any | |
| | integer between 1 to 620 of SEQ ID NO: 133, b is an integer | |
| | of 15 to 634, where both a and b correspond to the positions | |
| | of nucleotide residues shown in SEQ ID NO: 133, and | |
| | where b is greater than or equal to a + 14. | |
| 773827 | Preferably excluded from the present invention are one or | |
| | more polynucleotides comprising a nucleotide sequence | |
| | described by the general formula of a-b, where a is any | |
| | integer between 1 to 1841 of SEQ ID NO: 134, b is an | |
| | integer of 15 to 1855, where both a and b correspond to the | |
| | positions of nucleotide residues shown in SEQ ID NO: 134, | |
| | and where b is greater than or equal to a + 14. | |
| 774108 | Preferably excluded from the present invention are one or | T96288, R31388, R32886, R63543, R63597, R75811, R75812, H20285, |
| | more polynucleotides comprising a nucleotide sequence | H20509, H20599, H21238, H24872, H29854, H29945, H41103, |
| | described by the general formula of a-b, where a is any | H41208, H44188, H44189, R85628, R91367, H83459, H83571, |
| | integer between 1 to 903 of SEQ ID NO: 135, b is an integer | H97165, H97164, N25639, N29652, N29777, N32407, N32413, |
| | of 15 to 917, where both a and b correspond to the positions | N32580, N32835, N41918, N42281, N56607, N57152, N57196, |
| | of nucleotide residues shown in SEQ ID NO: 135, and | N69818, N70613, N93340, N93928, N94454, W24358, W25 163, |
| | where b is greater than or equal to a + 14. | W30800, W37904, W37964, W40428, W68631, W68632, W70339, |
| | | W80994, W81096, W81716, W81253, W81543, W81544, W94206, |
| | | AA004372, AA011346, AA016002, AA028888, AA029626, |
| | | AA029627, AA044028, AA044350, AA062804, AA08 1035, |
| | | AA131270, AA131354, AA131371 |
| 774636 | Preferably excluded from the present invention are one or | T54747, T69827, R14146, R50592, R55502, R73615, R73937, 1141540, |
| | more polynucleotides comprising a nucleotide sequence | R84981, R85 103, R87495, R88553, R88554, R88556, R888 18, R88839, |
| | described by the general formula of a-b, where a is any | R89675, R91235, 1151003, 1151004, H51581, 1179057, N70799, |
| | integer between 1 to 1257 of SEQ ID NO: 136, b is an | W02680, AA232327, AA2324 17, AA464467 |
| | integer of 15 to 1271, where both a and b correspond to the | |
| | positions of nucleotide residues shown in SEQ ID NO: 136, | |
| | and where b is greater than or equal to a + 14. | |
| 775339 | Preferably excluded from the present invention are one or | |
| | more polynucleotides comprising a nucleotide sequence | |
| | described by the general formula of a-b, where a is any | |
| | integer between 1 to 2003 of SEQ ID NO: 137, b is an | |
| | integer of 15 to 2017, where both a and b correspond to the | |
| | positions of nucleotide residues shown in SEQ ID NO: 137, | |
| | and where b is greater than or equal to a + 14. | |
| 775582 | Preferably excluded from the present invention are one or | T62486, T62631, H14642, R85991, H73603, N54912, N68727, N80228, |
| | more polynucleotides comprising a nucleotide sequence | N91617, W38518, W67302, W67418, AA171395, AA214500, |
| | described by the general formula of a-b, where a is any | A215291, AA464035 |
| | integer between 1 to 923 of SEQ ID NO: 138, b is an integer | |
| | of 15 to 937, where both a and b correspond to the positions | |
| | of nucleotide residues shown in SEQ ID NO: 138, and | |
| | where b is greater than or equal to a + 14. | |
| 775779 | Preferably excluded from the present invention are one or | |
| | more polynucleotides comprising a nucleotide sequence | |
| | described by the general formula of a-b, where a is any | |
| | integer between 1 to 2745 of SEQ ID NO: 139, b is an | |
| | integer of 15 to 2759, where both a and b correspond to the | |
| | positions of nucleotide residues shown in SEQ ID NO: 139, | |
| | and where b is greater than or equal to a + 14. | |
| 777809 | Preferably excluded from the present invention are one or | |
| | more polynucleotides comprising a nucleotide sequence | |
| | described by the general formula of a-b, where a is any | |
| | integer between 1 to 1227 of SEQ ID NO: 140, b is an | |
| | integer of 15 to 1241, where both a and b correspond to the | |
| | positions of nucleotide residues shown in SEQ ID NO: 140, | |
| | and where b is greater than or equal to a + 14. | |
| 778927 Preferably excluded from the present invention are one or | T50777, T50939, R11800, R19713, R31403, R32898, R44269, R44269, | |
| | more polynucleotides comprising a nucleotide sequence | R55431, R60041, R60 103, R69554, R74340, R74434, 1120427, H266 15, |
| | described by the general formula of a-b, where a is any | H26660, H42495, H43482, R85644, H51488, H68618, N58157, |
| | integer between 1 to 3391 of SEQ ID NO: 141, b is an | N58231, N77611, W39692, W45048, W56828, W57633, AA052900, |
| | integer of 15 to 3405, where both a and b correspond to the | AA057808, AA074705, AA122120, AA121079, AA12123 1, |
| | positions of nucleotide residues shown in SEQ ID NO: 141, | AA259051, AA464470 |
| | and where b is greater than or equal to a + 14. | |
| 779262 | Preferably excluded from the present invention are one or | R11844, R71241, R71292, 1100159, 1188551, 1190726, 1198059, N28770, |
| | more polynucleotides comprising a nucleotide sequence | N58442, N78033, W32671, AA035075, AA112651, AA112652, |
| | described by the general formula of a-b, where a is any | AA130035, AA2 15309, AA25 1209 |
| | integer between 1 to 2254 of SEQ ID NO: 142, b is an | |
| | integer of 15 to 2268, where both a and b correspond to the | |
| | positions of nucleotide residues shown in SEQ ID NO: 142, | |
| | and where b is greater than or equal to a + 14. | |
| 779392 | Preferably excluded from the present invention are one or | R25284, R36255, R36256, R42970, R46635, R42970, R46635, H28773, |
| | more polynucleotides comprising a nucleotide sequence | N52867, N70541, N77890, W05403, W05783, AA085067, AA085066, |
| | described by the general formula of a-b, where a is any | AA204650, AA2 10753, AA211713, AA251462, AA252456, |
| | integer between 1 to 1743 of SEQ ID NO: 143, b is an | A460350, AA460780 |
| | integer of 15 to 1757, where both a and b correspond to the | |
| | positions of nucleotide residues shown in SEQ ID NO: 143, | |
| | and where b is greater than or equal to a + 14. | |
| 780149 | Preferably excluded from the present invention are one or | |
| | more polynucleotides comprising a nucleotide sequence | |
| | described by the general formula of a-b, where a is any | |
| | integer between 1 to 1048 of SEQ ID NO: 144, b is an | |
| | integer of 15 to 1062, where both a and b correspond to the | |
| | positions of nucleotide residues shown in SEQ ID NO: 144, | |
| | and where b is greater than or equal to a + 14. | |
| 780583 | Preferably excluded from the present invention are one or | |
| | more polynucleotides comprising a nucleotide sequence | |
| | described by the general formula of a-b, where a is any | |
| | integer between 1 to 1016 of SEQ ID NO: 145, b is an | |
| | integer of 15 to 1030, where both a and b correspond to the | |
| | positions of nucleotide residues shown in SEQ ID NO: 145, | |
| | and where b is greater than or equal to a + 14. | |
| 780960 | Preferably excluded from the present invention are one or | |
| | more polynucleotides comprising a nucleotide sequence | |
| | described by the general formula of a-b, where a is any | |
| | integer between 1 to 800 of SEQ ID NO: 146, b is an integer | |
| | of 15 to 814, where both a and b correspond to the positions | |
| | of nucleotide residues shown in SEQ ID NO: 146, and | |
| | where b is greater than or equal to a + 14. | |
| 781469 | Preferably excluded from the present invention are one or | T95791, H18820, 1119074, 1122604, 1140723, H45802, H46056, |
| | more polynucleotides comprising a nucleotide sequence | H47074, H47156, H868 19, H86886, H88675, H88724, H88972, |
| | described by the general formula of a-b, where a is any | H89058, H88972, N28987, N36053, N39668, N47281, W19145, |
| | integer between 1 to 2664 of SEQ ID NO: 147, b is an | W68543, W68544, N91577, AA044679, AA044896, AA430011 |
| | integer of 15 to 2678, where both a and b correspond to the | |
| | positions of nucleotide residues shown in SEQ ID NO: 147, | |
| | and where b is greater than or equal to a + 14. | |
| 781556 | Preferably excluded from the present invention are one or | T94861, T94906, R215 16, R26869, R27098, R36258, R37965, R37966, |
| | more polynucleotides comprising a nucleotide sequence | R78172, H03413, H04116, 1114531, 1145546, R96826, R98130, N51409, |
| | described by the general formula of a-b, where a is any | N52365, N64272, N74939, N75 136, W23556, W35208, AA187823, |
| | integer between 1 to 1014 of SEQ ID NO: 148, b is an | AA191525, AA429367 |
| | integer of 15 to 1028, where both a and b correspond to the | |
| | positions of nucleotide residues shown in SEQ ID NO: 148, | |
| | and where b is greater than or equal to a + 14. | |
| 781771 | Preferably excluded from the present invention are one or | T95420, T99529, R50341, R52125, R72608, R72630, R72677, R72701, |
| | more polynucleotides comprising a nucleotide sequence | H26733, H26734, 1130106, 1159788, 1182441, N75 150, W42750, |
| | described by the general formula of a-b, where a is any | W42840 |
| | integer between 1 to 1411 of SEQ ID NO: 149, b is an | |
| | integer of 15 to 1425, where both a and b correspond to the | |
| | positions of nucleotide residues shown in SEQ ID NO: 149, | |
| | and where b is greater than or equal to a + 14. | |
| 782033 | Preferably excluded from the present invention are one or | H53100, H53207, H97410, H98035, N30753, N68541, W42491, |
| | more polynucleotides comprising a nucleotide sequence | W42641, W57808, AA046603, AA046753, AA136886, AA136997, |
| | described by the general formula of a-b, where a is any | AA143419, AA143420 |
| | integer between 1 to 766 of SEQ ID NO: 150, b is an integer | |
| | of 15 to 780, where both a and b correspond to the positions | |
| | of nucleotide residues shown in SEQ ID NO: 150, and | |
| | where b is greater than or equal to a + 14. | |
| 782105 | Preferably excluded from the present invention are one or | R97486, H72940, W90139 |
| | more polynucleotides comprising a nucleotide sequence | |
| | described by the general formula of a-b, where a is any | |
| | integer between 1 to 1052 of SEQ ID NO: 151, b is an | |
| | integer of 15 to 1066, where both a and b correspond to the | |
| | positions of nucleotide residues shown in SEQ ID NO: 151, | |
| | and where b is greater than or equal to a + 14. | |
| 782122 | Preferably excluded from the present invention are one or | T54379, T60348, T61029, T54271, T57801, R10793, T78907, T78959, |
| | more polynucleotides comprising a nucleotide sequence | R49078, R55635, R67844, R67845, R69587, R72600, R72666, H04742, |
| | described by the general formula of a-b, where a is any | H04830, H16978, H24654, H26129, 1126308, H26395, H26467, |
| | integer between 1 to 1635 of SEQ ID NO: 152, b is an | H28100, H28205, H28252, H28895, H28896, H30485, H39554, |
| | integer of 15 to 1649, where both a and b correspond to the | H42595, H42603, H42662, H43740, H44345, H44346, H44546, |
| | positions of nucleotide residues shown in SEQ ID NO: 152, | H44547, H44960, 1145012, H45860, R88120, R88214, H51204, |
| | and where b is greater than or equal to a + 14. | H58080, H58081, H64553, H64654, H70033, 1170034, H86451, |
| | | H70034, H99833, N24525, N29867, N30752, N35500, N39259, |
| | | N42463, N44804, N52550, N53985, N57289, N58726, N63349, |
| | | N67624, N67663, N68 157, N70299, N80615, N93230, N94595, |
| | | N98489, W19633, W23803, W25087, W31034, W37981, W37982, |
| | | W42579, W44389, W49677, W57614, W57871, W58142, W67781, |
| | | W67840, W68147, W68474, W68699, W68791, W69717, W80749, |
| | | W80837, N89879, AA025233, AA025568, AA025686, AA026020, |
| | | AA033846, AA039625, AA039693, AA046842, AA047013, |
| | | AA057608, AA057676, AA064637, AA064680, AA074448, |
| | | AA083591, AA098837, AA102142, AA113374, AA113402, |
| | | AA115525, AA114948, AA128972, AA128973, AA133142, |
| | | AA146949, AA148086, AA149283, AA149377, AA160012, |
| | | AA160688, AA172144, AA180932, AA182561 |
| 783135 | Preferably excluded from the present invention are one or | |
| | more polynucleotides comprising a nucleotide sequence | |
| | described by the general formula of a-b, where a is any | |
| | integer between 1 to 646 of SEQ ID NO: 153, b is an integer | |
| | of 15 to 660, where both a and b correspond to the positions | |
| | of nucleotide residues shown in SEQ ID NO: 153, and | |
| | where b is greater than or equal to a + 14. | |
| 783245 | Preferably excluded from the present invention are one or | |
| | more polynucleotides comprising a nucleotide sequence | |
| | described by the general formula of a-b, where a is any | |
| | integer between 1 to 591 of SEQ ID NO: 154, b is an integer | |
| | of 15 to 605, where both a and b correspond to the positions | |
| | of nucleotide residues shown in SEQ ID NO: 154, and | |
| | where b is greater than or equal to a + 14. | |
| 783247 | Preferably excluded from the present invention are one or | A155638 |
| | more polynucleotides comprising a nucleotide sequence | |
| | described by the general formula of a-b, where a is any | |
| | integer between 1 to 681 of SEQ ID NO: 155, b is an integer | |
| | of 15 to 695, where both a and b correspond to the positions | |
| | of nucleotide residues shown in SEQ ID NO: 155, and | |
| | where b is greater than or equal to a + 14. | |
| 783413 | Preferably excluded from the present invention are one or | H58751, H93683, H93684, N93167, W19186, W19958, W38771, |
| | more polynucleotides comprising a nucleotide sequence | N91367 |
| | described by the general formula of a-b, where a is any | |
| | integer between 1 to 766 of SEQ ID NO: 156, b is an integer | |
| | of 15 to 780, where both a and b correspond to the positions | |
| | of nucleotide residues shown in SEQ ID NO: 156, and | |
| | where b is greater than or equal to a + 14. | |
| 784407 | Preferably excluded from the present invention are one or | |
| | more polynucleotides comprising a nucleotide sequence | |
| | described by the general formula of a-b, where a is any | |
| | integer between 1 to 1113 of SEQ ID NO: 157, b is an | |
| | integer of 15 to 1127, where both a and b correspond to the | |
| | positions of nucleotide residues shown in SEQ ID NO: 157, | |
| | and where b is greater than or equal to a + 14. | |
| 784548 | Preferably excluded from the present invention are one or | |
| | more polynucleotides comprising a nucleotide sequence | |
| | described by the general formula of a-b, where a is any | |
| | integer between 1 to 1268 of SEQ ID NO: 158, b is an | |
| | integer of 15 to 1282, where both a and b correspond to the | |
| | positions of nucleotide residues shown in SEQ ID NO: 158, | |
| | and where b is greater than or equal to a + 14. | |
| 785075 | Preferably excluded from the present invention are one or | |
| | more polynucleotides comprising a nucleotide sequence | |
| | described by the general formula of a-b, where a is any | |
| | integer between 1 to 1491 of SEQ ID NO: 159, b is an | |
| | integer of 15 to 1505, where both a and b correspond to the | |
| | positions of nucleotide residues shown in SEQ ID NO: 159, | |
| | and where b is greater than or equal to a + 14. | |
| 785677 | Preferably excluded from the present invention are one or | |
| | more polynucleotides comprising a nucleotide sequence | |
| | described by the general formula of a-b, where a is any | |
| | integer between 1 to 722 of SEQ ID NO: 160, b is an integer | |
| | of 15 to 736, where both a and b correspond to the positions | |
| | of nucleotide residues shown in SEQ ID NO: 160, and | |
| | where b is greater than or equal to a + 14. | |
| 786238 | Preferably excluded from the present invention are one or | |
| | more polynucleotides comprising a nucleotide sequence | |
| | described by the general formula of a-b, where a is any | |
| | integer between 1 to 981 of SEQ ID NO: 161, b is an integer | |
| | of 15 to 995, where both a and b correspond to the positions | |
| | of nucleotide residues shown in SEQ ID NO: 161, and | |
| | where b is greater than or equal to a + 14. | |
| 786389 | Preferably excluded from the present invention are one or | |
| | more polynucleotides comprising a nucleotide sequence | |
| | described by the general formula of a-b, where a is any | |
| | integer between 1 to 1111 of SEQ ID NO: 162, b is an | |
| | integer of 15 to 1125, where both a and b correspond to the | |
| | positions of nucleotide residues shown in SEQ ID NO: 162, | |
| | and where b is greater than or equal to a + 14. | |
| 786929 | Preferably excluded from the present invention are one or | |
| | more polynucleotides comprising a nucleotide sequence | |
| | described by the general formula of a-b, where a is any | |
| | integer between 1 to 409 of SEQ ID NO: 163, b is an integer | |
| | of 15 to 423, where both a and b correspond to the positions | |
| | of nucleotide residues shown in SEQ ID NO: 163, and | |
| | where b is greater than or equal to a + 14. | |
| 786932 | Preferably excluded from the present invention are one or | |
| | more polynucleotides comprising a nucleotide sequence | |
| | described by the general formula of a-b, where a is any | |
| | integer between 1 to 1628 of SEQ ID NO: 164, b is an | |
| | integer of 15 to 1642, where both a and b correspond to the | |
| | positions of nucleotide residues shown in SEQ ID NO: 164, | |
| | and where b is greater than or equal to a + 14. | |
| 787078 | Preferably excluded from the present invention are one or | |
| | more polynucleotides comprising a nucleotide sequence | |
| | described by the general formula of a-b, where a is any | |
| | integer between 1 to 1101 of SEQ ID NO: 165, b is an | |
| | integer of 15 to 1115, where both a and b correspond to the | |
| | positions of nucleotide residues shown in SEQ ID NO: 165, | |
| | and where b is greater than or equal to a + 14. | |
| 787139 | Preferably excluded from the present invention are one or | |
| | more polynucleotides comprising a nucleotide sequence | |
| | described by the general formula of a-b, where a is any | |
| | integer between 1 to 1052 of SEQ ID NO: 166, b is an | |
| | integer of 15 to 1066, where both a and b correspond to the | |
| | positions of nucleotide residues shown in SEQ ID NO: 166, | |
| | and where b is greater than or equal to a + 14. | |
| 787283 | Preferably excluded from the present invention are one or R22724 | |
| | more polynucleotides comprising a nucleotide sequence | |
| | described by the general formula of a-b, where a is any | |
| | integer between 1 to 643 of SEQ ID NO: 167, b is an integer | |
| | of 15 to 657, where both a and b correspond to the positions | |
| | of nucleotide residues shown in SEQ ID NO: 167, and | |
| | where b is greater than or equal to a + 14. | |
| 788761 | Preferably excluded from the present invention are one or | |
| | more polynucleotides comprising a nucleotide sequence | |
| | described by the general formula of a-b, where a is any | |
| | integer between 1 to 1012 of SEQ ID NO: 168, b is an | |
| | integer of 15 to 1026, where both a and b correspond to the | |
| | positions of nucleotide residues shown in SEQ ID NO: 168, | |
| | and where b is greater than or equal to a + 14. | |
| 788988 | Preferably excluded from the present invention are one or | |
| | more polynucleotides comprising a nucleotide sequence | |
| | described by the general formula of a-b, where a is any | |
| | integer between 1 to 760 of SEQ ID NO: 169, b is an integer | |
| | of 15 to 774, where both a and b correspond to the positions | |
| | of nucleotide residues shown in SEQ ID NO: 169, and | |
| | where b is greater than or equal to a + 14. | |
| 789092 | Preferably excluded from the present invention are one or | AA234588 |
| | more polynucleotides comprising a nucleotide sequence | |
| | described by the general formula of a-b, where a is any | |
| | integer between 1 to 388 of SEQ ID NO: 170, b is an integer | |
| | of 15 to 402, where both a and b correspond to the positions | |
| | of nucleotide residues shown in SEQ ID NO: 170, and | |
| | where b is greater than or equal to a + 14. | |
| 789298 | Preferably excluded from the present invention are one or | |
| | more polynucleotides comprising a nucleotide sequence | |
| | described by the general formula of a-b, where a is any | |
| | integer between 1 to 782 of SEQ ID NO: 171, b is an integer | |
| | of 15 to 796, where both a and b correspond to the positions | |
| | of nucleotide residues shown in SEQ ID NO: 171, and | |
| | where b is greater than or equal to a + 14. | |
| 789299 | Preferably excluded from the present invention are one or | |
| | more polynucleotides comprising a nucleotide sequence | |
| | described by the general formula of a-b, where a is any | |
| | integer between 1 to 464 of SEQ ID NO: 172, b is an integer | |
| | of 15 to 478, where both a and b correspond to the positions | |
| | of nucleotide residues shown in SEQ ID NO: 172, and | |
| | where b is greater than or equal to a + 14. | |
| 789718 | Preferably excluded from the present invention are one or | |
| | more polynucleotides comprising a nucleotide sequence | |
| | described by the general formula of a-b, where a is any | |
| | integer between 1 to 642 of SEQ ID NO: 173, b is an integer | |
| | of 15 to 656, where both a and b correspond to the positions | |
| | of nucleotide residues shown in SEQ ID NO: 173, and | |
| | where b is greater than or equal to a + 14. | |
| 789957 | Preferably excluded from the present invention are one or | T51260, T61941, T62167, T77034, T90753, R38108, N32708, N92379, |
| | more polynucleotides comprising a nucleotide sequence | W24621, W42543, W42478, AA128007, AA128031, AA134234, |
| | described by the general formula of a-b, where a is any | AA424998 |
| | integer between 1 to 1877 of SEQ ID NO: 174, b is an | |
| | integer of 15 to 1891, where both a and b correspond to the | |
| | positions of nucleotide residues shown in SEQ ID NO: 174, | |
| | and where b is greater than or equal to a + 14. | |
| 789977 | Preferably excluded from the present invention are one or | T56442, T78292, R37940, R56008, R56009, R56573, R56574, H11080, |
| | more polynucleotides comprising a nucleotide sequence | N34431, N48665, AA010749, AA011177, AA070806, AA070882, |
| | described by the general formula of a-b, where a is any | AA146859, AA147636, AA147691, AA164223, AA164224, |
| | integer between 1 to 2147 of SEQ ID NO: 175, b is an | AA210729, AA210859, AA243063, AA243070, AA464493, AA464494 |
| | integer of 15 to 2161, where both a and b correspond to the | |
| | positions of nucleotide residues shown in SEQ ID NO: i75, | |
| | and where b is greater than or equal to a + 14. | |
| 790285 | Preferably excluded from the present invention are one or | T66279, T66328, T84164, T85098, R24232, R24233, H03657, H03658, |
| | more polynucleotides comprising a nucleotide sequence | H98526, H98556, H99618, N22728, N29400, N32172, N33953, |
| | described by the general formula of a-b, where a is any | N41460, N69471, N70552, N73722, W03893, W44579, W72407, |
| | integer between 1 to 2397 of SEQ ID NO: 176, b is an | W76486, W78102, W79410, N90963, AA044816, AA044841, |
| | integer of 15 to 2411, where both a and b correspond to the | AA086039, AA086121, AA088877, AA102298, AA130887, |
| | positions of nucleotide residues shown in SEQ ID NO: 176, | AA131529, AA131603, AA181784, AAi825i5, AA190450, |
| | and where b is greater than or equal to a + 14. | AA191392, AA223757 |
| 790509 | Preferably excluded from the present invention are one or | 68040, H17760, AA101036, AA129837 |
| | more polynucleotides comprising a nucleotide sequence | |
| | described by the general formula of a-b, where a is any | |
| | integer between 1 to 1324 of SEQ ID NO: 177, b is an | |
| | integer of 15 to 1338, where both a and b correspond to the | |
| | positions of nucleotide residues shown in SEQ ID NO: 177, | |
| | and where b is greater than or equal to a + 14. | |
| 790775 | Preferably excluded from the present invention are one or | 25320, N31432, W81044, W81097 |
| | more polynucleotides comprising a nucleotide sequence | |
| | described by the general formula of a-b, where a is any | |
| | integer between 1 to 1600 of SEQ ID NO: 178, b is an | |
| | integer of 15 to 1614, where both a and b correspond to the | |
| | positions of nucleotide residues shown in SEQ ID NO: 178, | |
| | and where b is greater than or equal to a + 14. | |
| 790888 | Preferably excluded from the present invention are one or | R14550, R15204, T26493, R21597, R22908, R23010, R41211, R41649, |
| | more polynucleotides comprising a nucleotide sequence | R43371, R41211, R41649, R43371, R58989, R59048, H05739, H05845, |
| | described by the general formula of a-b, where a is any | H17266, H17265, H23579, H44104, H46505, H47043, H58955, |
| | integer between 1 to 4278 of SEQ ID NO: 179, b is an | H59002, H73676, H73730, H80078, H82275, H82289, H82399, |
| | integer of 15 to 4292, where both a and b correspond to the | H82381, H97810, H98133, H98737, N23117, N24310, N25196, |
| | positions of nucleotide residues shown in SEQ ID NO: 179, | N25265, N27792, N28735, N29893, N33395, N33904, N36066, |
| | and where b is greater than or equal to a + 14. | N36839, N42542, N46060, N51230, N59535, N67737, N73641, |
| | | N78481, N78694, W03555, W15202, W52445, W52723, W95124, |
| | | AA047257, AA057142, AA204699, AA251464, AA430598 |
| 791506 | Preferably excluded from the present invention are one or | |
| | more polynucleotides comprising a nucleotide sequence | |
| | described by the general formula of a-b, where a is any | |
| | integer between 1 to 229 of SEQ ID NO: 180, b is an integer | |
| | of 15 to 243, where both a and b correspond to the positions | |
| | of nucleotide residues shown in SEQ ID NO: 180, and | |
| | where b is greater than or equal to a + 14. | |
| 791649 | Preferably excluded from the present invention are one or | |
| | more polynucleotides comprising a nucleotide sequence | |
| | described by the general formula of a-b, where a is any | |
| | integer between 1 to 799 of SEQ ID NO: 181, b is an integer | |
| | of 15 to 813, where both a and b correspond to the positions | |
| | of nucleotide residues shown in SEQ ID NO: 181, and | |
| | where b is greater than or equal to a + 14. | |
| 791802 | Preferably excluded from the present invention are one or | |
| | more polynucleotides comprising a nucleotide sequence | |
| | described by the general formula of a-b, where a is any | |
| | integer between 1 to 808 of SEQ ID NO: 182, b is an integer | |
| | of 15 to 822, where both a and b correspond to the positions | |
| | of nucleotide residues shown in SEQ ID NO: 182, and | |
| | where b is greater than or equal to a + 14. | |
| 792002 | Preferably excluded from the present invention are one or | T49735, T49736, T953 10, T95391, T99384, T99612, R63493, R63494, |
| | more polynucleotides comprising a nucleotide sequence | H27739, R91698, R92136, H52608, H57619, H58464, H61415, |
| | described by the general formula of a-b, where a is any | H62139, H69019, H87167, H87669, N21358, N70307, N79596, |
| | integer between 1 to 1081 of SEQ ID NO: 183, b is an | W19063, W58498, W58651, W79687, W81289, AA099849, AA099972, |
| | integer of 15 to 1095, where both a and b correspond to the | AA232767 |
| | positions of nucleotide residues shown in SEQ ID NO: 183, | |
| | and where b is greater than or equal to a + 14. | |
| 792291 | Preferably excluded from the present invention are one or | T55436, R21797, R22403, R22452, R22916, R23020, R76901, R77068, |
| | more polynucleotides comprising a nucleotide sequence | H22573, H25752, H25866, R83900, H50717, 1150821, H64026, |
| | described by the general formula of a-b, where a is any | H64791, H95702, N64545, N69769, N74704, N80341, W05092, |
| | integer between 1 to 3661 of SEQ ID NO: 184, b is an | W79489, W79634, AA005055, AA005007, AA025043, AA036711, |
| | integer of 15 to 3675, where both a and b correspond to the | A037127, AA043916, AA055100, AA063627, AA069142, |
| | positions of nucleotide residues shown in SEQ ID NO: 184, | AA069230, AA069323, AA069376, AA112277, AA112531, |
| | and where his greater than or equal to a + 14. | AA115279, AA151238, AA15 1239, AA151582, AA149398, |
| | | AA149961, AA150069, AA158029, AA158321, AA158692, |
| | | AA158693, AA161232, AA236787, AA236834, AA256776, AA261961 |
| 792371 | Preferably excluded from the present invention are one or | |
| | more polynucleotides comprising a nucleotide sequence | |
| | described by the general formula of a-b, where a is any | |
| | integer between 1 to 1026 of SEQ ID NO: 185, b is an | |
| | integer of 15 to 1040, where both a and b correspond to the | |
| | positions of nucleotide residues shown in SEQ ID NO: 185, | |
| | and where b is greater than or equal to a + 14. | |
| 792660 | Preferably excluded from the present invention are one or | T59054, T86590, T83271, R48677, R53483, R53482, R62329, R62330, |
| | more polynucleotides comprising a nucleotide sequence | R66651, R67372, R69095, R69210, R71144, R82632, R82676, H15764, |
| | described by the general formula of a-b, where a is any | H15765, H19518, H19605, H27898, H42872, H42936, H49329, |
| | integer between 1 to 803 of SEQ ID NO: 186, b is an integer | H49330, H50062, 1150061, H87268, H87324, H96667, N22675, |
| | of 15 to 817, where both a and b correspond to the positions | N92574, W37223, W37563, W38866, W61119, W65380, AA035095, |
| | of nucleotide residues shown in SEQ ID NO: 186, and | AA035635, AA037254, AA054951, AA062973, AA082301, AA132472 |
| | where b is greater than or equal to a + 14. | |
| 792782 | Preferably excluded from the present invention are one or | |
| | more polynucleotides comprising a nucleotide sequence | |
| | described by the general formula of a-b, where a is any | |
| | integer between 1 to 1066 of SEQ ID NO: 187, b is an | |
| | integer of 15 to 1080, where both a and b correspond to the | |
| | positions of nucleotide residues shown in SEQ ID NO: 187, | |
| | and where b is greater than or equal to a + 14. | |
| 792890 | Preferably excluded from the present invention are one or | AA251351 |
| | more polynucleotides comprising a nucleotide sequence | |
| | described by the general formula of a-b, where a is any | |
| | integer between 1 to 1272 of SEQ ID NO: 188, b is an | |
| | integer of 15 to 1286, where both a and b correspond to the | |
| | positions of nucleotide residues shown in SEQ ID NO: 188, | |
| | and where b is greater than or equal to a + 14. | |
| 792931 | Preferably excluded from the present invention are one or | |
| | more polynucleotides comprising a nucleotide sequence | |
| | described by the general formula of a-b, where a is any | |
| | integer between 1 to 1724 of SEQ ID NO: 189, b is an | |
| | integer of 15 to 1738, where both a and b correspond to the | |
| | positions of nucleotide residues shown in SEQ ID NO: 189, | |
| | and where b is greater than or equal to a + 14. | |
| 792943 | Preferably excluded from the present invention are one or | |
| | more polynucleotides comprising a nucleotide sequence | |
| | described by the general formula of a-b, where a is any | |
| | integer between 1 to 1909 of SEQ ID NO: 190, b is an | |
| | integer of 15 to 1923, where both a and b correspond to the | |
| | positions of nucleotide residues shown in SEQ ID NO: 190, | |
| | and where b is greater than or equal to a + 14. | |
| 793104 | Preferably excluded from the present invention are one or | |
| | more polynucleotides comprising a nucleotide sequence | |
| | described by the general formula of a-b, where a is any | |
| | integer between 1 to 236 of SEQ ID NO: 191, b is an integer | |
| | of 15 to 250, where both a and b correspond to the positions | |
| | of nucleotide residues shown in SEQ ID NO: 191, and | |
| | where b is greater than or equal to a + 14. | |
| 793445 | Preferably excluded from the present invention are one or | AA034998, AA044249, AA088830, AA429418 |
| | more polynucleotides comprising a nucleotide sequence | |
| | described by the general formula of a-b, where a is any | |
| | integer between 1 to 1888 of SEQ ID NO: 192, b is an | |
| | integer of 15 to 1902, where both a and b correspond to the | |
| | positions of nucleotide residues shown in SEQ ID NO: 192, | |
| | and where b is greater than or equal to a + 14. | |
| 793446 | Preferably excluded from the present invention are one or | T57765, T60664, HO 1264, H45774, H54790, H54842, H64484, H64485, |
| | more polynucleotides comprising a nucleotide sequence | N98810, W58332, W58653, W74582, W79320, W79420, W79565, |
| | described by the general formula of a-b, where a is any | W92452, AA027210, AA027209, AA029725, AA029663, AA088693, |
| | integer between 1 to 546 of SEQ ID NO: 193, b is an integer | AA121506, AA127731, AA428362 |
| | of 15 to 560, where both a and b correspond to the positions | |
| | of nucleotide residues shown in SEQ ID NO: 193, and | |
| | where b is greater than or equal to a + 14. | |
| 793639 | Preferably excluded from the present invention are one or | N69881, N93023, N98853, W21375, W73944, W77988, AA169530, |
| | more polynucleotides comprising a nucleotide sequence | AA169837, AA176453, AA176931 |
| | described by the general formula of a-b, where a is any | |
| | integer between 1 to 576 of SEQ ID NO: 194, b is an integer | |
| | of 15 to 590, where both a and b correspond to the positions | |
| | of nucleotide residues shown in SEQ ID NO: 194, and | |
| | where b is greater than or equal to a + 14. | |
| 794213 | Preferably excluded from the present invention are one or | N53897, N55318 |
| | more polynucleotides comprising a nucleotide sequence | |
| | described by the general formula of a-b, where a is any | |
| | integer between 1 to 677 of SEQ ID NO: 195, b is an integer | |
| | of 15 to 691, where both a and b correspond to the positions | |
| | of nucleotide residues shown in SEQ ID NO: 195, and | |
| | where b is greater than or equal to a + 14. | |
| 795858 | Preferably excluded from the present invention are one or | |
| | more polynucleotides comprising a nucleotide sequence | |
| | described by the general formula of a-b, where a is any | |
| | integer between 1 to 1758 of SEQ ID NO: 196, b is an | |
| | integer of 15 to 1772, where both a and b correspond to the | |
| | positions of nucleotide residues shown in SEQ ID NO: 196, | |
| | and where b is greater than or equal to a + 14. | |
| 795955 | Preferably excluded from the present invention are one or | |
| | more polynucleotides comprising a nucleotide sequence | |
| | described by the general formula of a-b, where a is any | |
| | integer between 1 to 661 of SEQ ID NO: 197, b is an integer | |
| | of 15 to 675, where both a and b correspond to the positions | |
| | of nucleotide residues shown in SEQ ID NO: 197, and | |
| | where b is greater than or equal to a + 14. | |
| 796359 | Preferably excluded from the present invention are one or | |
| | more polynucleotides comprising a nucleotide sequence | |
| | described by the general formula of a-b, where a is any | |
| | integer between 1 to 543 of SEQ ID NO: 198, b is an integer | |
| | of 15 to 557, where both a and b correspond to the positions | |
| | of nucleotide residues shown in SEQ ID NO: 198, and | |
| | where b is greater than or equal to a + 14. | |
| 796555 | referably excluded from the present invention are one or | T69136, T69194, T95612, T95713, R53091, R73126, N41876, N49174, |
| | more polynucleotides comprising a nucleotide sequence | W05348, W04725, W31397, W31827, W92674, AA039513 |
| | described by the general formula of a-b, where a is any | |
| | integer between 1 to 2597 of SEQ ID NO: 199, b is an | |
| | integer of 15 to 2611, where both a and b correspond to the | |
| | positions of nucleotide residues shown in SEQ ID NO: 199, | |
| | and where b is greater than or equal to a + 14. | |
| 796675 | Preferably excluded from the present invention are one or | |
| | more polynucleotides comprising a nucleotide sequence | |
| | described by the general formula of a-b, where a is any | |
| | integer between 1 to 2302 of SEQ ID NO: 200, b is an | |
| | integer of 15 to 2316, where both a and b correspond to the | |
| | positions of nucleotide residues shown in SEQ ID NO: 200, | |
| | and where b is greater than or equal to a + 14. | |
| 796743 | Preferably excluded from the present invention are one or | |
| | more polynucleotides comprising a nucleotide sequence | |
| | described by the general formula of a-b, where a is any | |
| | integer between 1 to 1133 of SEQ ID NO: 201, b is an | |
| | integer of 15 to 1147, where both a and b correspond to the | |
| | positions of nucleotide residues shown in SEQ ID NO: 201, | |
| | and where b is greater than or equal to a + 14. | |
| 796792 | Preferably excluded from the present invention are one or | |
| | more polynucleotides comprising a nucleotide sequence | |
| | described by the general formula of a-b, where a is any | |
| | integer between 1 to 674 of SEQ ID NO: 202, b is an integer | |
| | of 15 to 688, where both a and b correspond to the positions | |
| | of nucleotide residues shown in SEQ ID NO: 202, and | |
| | where b is greater than or equal to a + 14. | |
| 799668 | Preferably excluded from the present invention are one or | |
| | more polynucleotides comprising a nucleotide sequence | |
| | described by the general formula of a-b, where a is any | |
| | integer between 1 to 290 of SEQ ID NO: 203, b is an integer | |
| | of 15 to 304, where both a and b correspond to the positions | |
| | of nucleotide residues shown in SEQ ID NO: 203, and | |
| | where b is greater than or equal to a + 14. | |
| 799669 | Preferably excluded from the present invention are one or | |
| | more polynucleotides comprising a nucleotide sequence | |
| | described by the general formula of a-b, where a is any | |
| | integer between 1 to 403 of SEQ ID NO: 204, b is an integer | |
| | of 15 to 417, where both a and b correspond to the positions | |
| | of nucleotide residues shown in SEQ ID NO: 204, and | |
| | where b is greater than or equal to a + 14. | |
| 799673 | Preferably excluded from the present invention are one or | |
| | more polynucleotides comprising a nucleotide sequence | |
| | described by the general formula of a-b, where a is any | |
| | integer between 1 to 537 of SEQ ID NO: 205, b is an integer | |
| | of 15 to 551, where both a and b correspond to the positions | |
| | of nucleotide residues shown in SEQ ID NO: 205, and | |
| | where b is greater than or equal to a + 14. | |
| 799674 | Preferably excluded from the present invention are one or | |
| | more polynucleotides comprising a nucleotide sequence | |
| | described by the general formula of a-b, where a is any | |
| | integer between 1 to 1087 of SEQ ID NO: 206, b is an | |
| | integer of 15 to 1101, where both a and b correspond to the | |
| | positions of nucleotide residues shown in SEQ ID NO: 206, | |
| | and where b is greater than or equal to a + 14. | |
| 799678 | Preferably excluded from the present invention are one or | |
| | more polynucleotides comprising a nucleotide sequence | |
| | described by the general formula of a-b, where a is any | |
| | integer between 1 to 501 of SEQ ID NO: 207, b is an integer | |
| | of 15 to 515, where both a and b correspond to the positions | |
| | of nucleotide residues shown in SEQ ID NO: 207, and | |
| | where b is greater than or equal to a + 14. | |
| 799728 | Preferably excluded from the present invention are one or | |
| | more polynucleotides comprising a nucleotide sequence | |
| | described by the general formula of a-b, where a is any | |
| | integer between 1 to 255 of SEQ ID NO: 208, b is an integer | |
| | of 15 to 269, where both a and b correspond to the positions | |
| | of nucleotide residues shown in SEQ ID NO: 208, and | |
| | where b is greater than or equal to a + 14. | |
| 799748 | Preferably excluded from the present invention are one or | H19497, H19579, H50117, H50164, H52826, H52827, H61184, |
| | more polynucleotides comprising a nucleotide sequence | H62087, H96290, H96291, N20586, N21261, N28978, N30137, |
| | described by the general formula of a-b, where a is any | N30490, N35750, W31933, W37535, N90542, AA418545, AA418511 |
| | integer between 1 to 720 of SEQ ID NO: 209, b is an integer | |
| | of 15 to 734, where both a and b correspond to the positions | |
| | of nucleotide residues shown in SEQ ID NO: 209, and | |
| | where b is greater than or equal to a + 14. | |
| 799760 | Preferably excluded from the present invention are one or | |
| | more polynucleotides comprising a nucleotide sequence | |
| | described by the general formula of a-b, where a is any | |
| | integer between 1 to 644 of SEQ ID NO: 2 10, b is an integer | |
| | of 15 to 658, where both a and b correspond to the positions | |
| | of nucleotide residues shown in SEQ ID NO: 210, and | |
| | where b is greater than or equal to a + 14. | |
| 799805 | Preferably excluded from the present invention are one or | |
| | more polynucleotides comprising a nucleotide sequence | |
| | described by the general formula of a-b, where a is any | |
| | integer between 1 to 190 of SEQ ID NO: 2 11, b is an integer | |
| | of 15 to 204, where both a and b correspond to the positions | |
| | of nucleotide residues shown in SEQ ID NO: 211, and | |
| | where b is greater than or equal to a + 14. | |
| 800296 | Preferably excluded from the present invention are one or | |
| | more polynucleotides comprising a nucleotide sequence | |
| | described by the general formula of a-b, where a is any | |
| | integer between 1 to 1257 of SEQ ID NO: 212, b is an | |
| | integer of 15 to 1271, where both a and b correspond to the | |
| | positions of nucleotide residues shown in SEQ ID NO: 2 12, | |
| | and where b is greater than or equal to a + 14. | |
| 800327 | Preferably excluded from the present invention are one or | |
| | more polynucleotides comprising a nucleotide sequence | |
| | described by the general formula of a-b, where a is any | |
| | integer between 1 to 1011 of SEQ ID NO: 213, b is an | |
| | integer of 15 to 1025, where both a and b correspond to the | |
| | positions of nucleotide residues shown in SEQ ID NO: 2 13, | |
| | and where b is greater than or equal to a + 14. | |
| 800816 | Preferably excluded from the present invention are one or | |
| | more polynucleotides comprising a nucleotide sequence | |
| | described by the general formula of a-b, where a is any | |
| | integer between 1 to 337 of SEQ ID NO: 214, b is an integer | |
| | of 15 to 351, where both a and b correspond to the positions | |
| | of nucleotide residues shown in SEQ ID NO: 214, and | |
| | where b is greater than or equal to a + 14. | |
| 800835 | Preferably excluded from the present invention are one or | |
| | more polynucleotides comprising a nucleotide sequence | |
| | described by the general formula of a-b, where a is any | |
| | integer between 1 to 1073 of SEQ ID NO: 215, b is an | |
| | integer of 15 to 1087, where both a and b correspond to the | |
| | positions of nucleotide residues shown in SEQ ID NO: 2 15, | |
| | and where b is greater than or equal to a + 14. | |
| 805429 | Preferably excluded from the present invention are one or | |
| | more polynucleotides comprising a nucleotide sequence | |
| | described by the general formula of a-b, where a is any | |
| | integer between 1 to 1963 of SEQ ID NO: 2 16, b is an | |
| | integer of 15 to 1977, where both a and b correspond to the | |
| | positions of nucleotide residues shown in SEQ ID NO: 216, | |
| | and where b is greater than or equal to a + 14. | |
| 805458 | Preferably excluded from the present invention are one or | T82438, T82439, R19121, R20391, R28602, R36743, R43508, R46035, |
| | more polynucleotides comprising a nucleotide sequence | R43508, R46035, R79588, H24625, N28372, N28785, N29421, N35476, |
| | described by the general formula of a-b, where a is any | N57353, N72836, N79096, W03034, AA016073, AA019733, |
| | integer between 1 to 2801 of SEQ ID NO: 217, b is an | A021030, AA062895, AA081968, AA115692, AA133511, |
| | integer of 15 to 2815, where both a and b correspond to the | AA151852, AA149707, AA194903, AA194902 |
| | positions of nucleotide residues shown in SEQ ID NO: 2 17, | |
| | and where b is greater than or equal to a + 14. | |
| 805478 | Preferably excluded from the present invention are one or | |
| | more polynucleotides comprising a nucleotide sequence | |
| | described by the general formula of a-b, where a is any | |
| | integer between 1 to 1631 of SEQ ID NO: 218, b is an | |
| | integer of 15 to 1645, where both a and b correspond to the | |
| | positions of nucleotide residues shown in SEQ ID NO: 2 18, | |
| | and where b is greater than or equal to a + 14. | |
| 805805 | Preferably excluded from the present invention are one or | |
| | more polynucleotides comprising a nucleotide sequence | |
| | described by the general formula of a-b, where a is any | |
| | integer between 1 to 464 of SEQ ID NO: 219, b is an integer | |
| | of 15 to 478, where both a and b correspond to the positions | |
| | of nucleotide residues shown in SEQ ID NO: 2 19, and | |
| | where b is greater than or equal to a + 14. | |
| 806486 | Preferably excluded from the present invention are one or | |
| | more polynucleotides comprising a nucleotide sequence | |
| | described by the general formula of a-b, where a is any | |
| | integer between 1 to 818 of SEQ ID NO: 220, b is an integer | |
| | of 15 to 832, where both a and b correspond to the positions | |
| | of nucleotide residues shown in SEQ ID NO: 220, and | |
| | where b is greater than or equal to a + 14. | |
| 806498 | Preferably excluded from the present invention are one or | |
| | more polynucleotides comprising a nucleotide sequence | |
| | described by the general formula of a-b, where a is any | |
| | integer between 1 to 1878 of SEQ ID NO: 221, b is an | |
| | integer of 15 to 1892, where both a and b correspond to the | |
| | positions of nucleotide residues shown in SEQ ID NO: 221, | |
| | and where b is greater than or equal to a + 14. | |
| 806819 | Preferably excluded from the present invention are one or | |
| | more polynucleotides comprising a nucleotide sequence | |
| | described by the general formula of a-b, where a is any | |
| | integer between 1 to 854 of SEQ ID NO: 222, b is an integer | |
| | of 15 to 868, where both a and b correspond to the positions | |
| | of nucleotide residues shown in SEQ ID NO: 222, and | |
| | where b is greater than or equal to a + 14. | |
| 810870 | Preferably excluded from the present invention are one or | R50267, R50730, H27672, H27673, H30138, H99256, N74342, |
| | more polynucleotides comprising a nucleotide sequence | N80868, W05054, W07601 |
| | described by the general formula of a-b, where a is any | |
| | integer between 1 to 1502 of SEQ ID NO: 223, b is an | |
| | integer of 15 to 1516, where both a and b correspond to the | |
| | positions of nucleotide residues shown in SEQ ID NO: 223, | |
| | and where b is greater than or equal to a + 14. | |
| 811730 | Preferably excluded from the present invention are one or | |
| | more polynucleotides comprising a nucleotide sequence | |
| | described by the general formula of a-b, where a is any | |
| | integer between 1 to 1292 of SEQ ID NO: 224, b is an | |
| | integer of 15 to 1306, where both a and b correspond to the | |
| | positions of nucleotide residues shown in SEQ ID NO: 224, | |
| | and where b is greater than or equal to a + 14. | |
| 813025 | Preferably excluded from the present invention are one or | |
| | more polynucleotides comprising a nucleotide sequence | |
| | described by the general formula of a-b, where a is any | |
| | integer between 1 to 570 of SEQ ID NO: 225, b is an integer | |
| | of 15 to 584, where both a and b correspond to the positions | |
| | of nucleotide residues shown in SEQ ID NO: 225, and | |
| | where b is greater than or equal to a + 14. | |
| 813233 | Preferably excluded from the present invention are one or | |
| | more polynucleotides comprising a nucleotide sequence | |
| | described by the general formula of a-b, where a is any | |
| | integer between 1 to 509 of SEQ ID NO: 226, b is an integer | |
| | of 15 to 523, where both a and b correspond to the positions | |
| | of nucleotide residues shown in SEQ ID NO: 226, and | |
| | where b is greater than or equal to a + 14. | |
| 813262 | Preferably excluded from the present invention are one or | |
| | more polynucleotides comprising a nucleotide sequence | |
| | described by the general formula of a-b, where a is any | |
| | integer between 1 to 2363 of SEQ ID NO: 227, b is an | |
| | integer of 15 to 2377, where both a and b correspond to the | |
| | positions of nucleotide residues shown in SEQ ID NO: 227, | |
| | and where b is greater than or equal to a + 14. | |
| 815637 | Preferably excluded from the present invention are one or | |
| | more polynucleotides comprising a nucleotide sequence | |
| | described by the general formula of a-b, where a is any | |
| | integer between I to 449 of SEQ ID NO: 228, b is an integer | |
| | of 15 to 463, where both a and b correspond to the positions | |
| | of nucleotide residues shown in SEQ ID NO: 228, and | |
| | where b is greater than or equal to a + 14. | |
| 815853 | Preferably excluded from the present invention are one or | R53293, R59708, R59818, R88929, R89609, H78819, N52182, |
| | more polynucleotides comprising a nucleotide sequence | AA125808, AA128281 |
| | described by the general formula of a-b, where a is any | |
| | integer between 1 to 1218 of SEQ ID NO: 229, b is an | |
| | integer of 15 to 1232, where both a and b correspond to the | |
| | positions of nucleotide residues shown in SEQ ID NO: 229, | |
| | and where b is greater than or equal to a + 14. | |
| 815999 | Preferably excluded from the present invention are one or | |
| | more polynucleotides comprising a nucleotide sequence | |
| | described by the general formula of a-b, where a is any | |
| | integer between 1 to 1049 of SEQ ID NO: 230, b is an | |
| | integer of 15 to 1063, where both a and b correspond to the | |
| | positions of nucleotide residues shown in SEQ ID NO: 230, | |
| | and where b is greater than or equal to a + 14. | |
| 823427 | Preferably excluded from the present invention are one or | T53986, T60846, T72425, R18752, H22479, H50211, N40817, N93431, |
| | more polynucleotides comprising a nucleotide sequence | W21474, W21308, W32281, W44860, W95821, N90881, AA132037, |
| | described by the general formula of a-b, where a is any | AA131965, AA151157, AA155868, AA156600, AA156837, |
| | integer between 1 to 1049 of SEQ ID NO: 231, b is an | AA157061, AA157045, AA160623, AA169460, AA176447, |
| | integer of 15 to 1063, where both a and b correspond to the | AA178894, AA179764, AA180438, AA181145, AA181144, |
| | positions of nucleotide residues shown in SEQ ID NO: 231, | AA196382, AA196478 |
| | and where b is greater than or equal to a + 14. | |
| 823704 | Preferably excluded from the present invention are one or | |
| | more polynucleotides comprising a nucleotide sequence | |
| | described by the general formula of a-b, where a is any | |
| | integer between 1 to 1460 of SEQ ID NO: 232, b is an | |
| | integer of 15 to 1474, where both a and b correspond to the | |
| | positions of nucleotide residues shown in SEQ ID NO: 232, | |
| | and where b is greater than or equal to a + 14. | |
| 824798 | Preferably excluded from the present invention are one or | |
| | more polynucleotides comprising a nucleotide sequence | |
| | described by the general formula of a-b, where a is any | |
| | integer between 1 to 1768 of SEQ ID NO: 233, b is an | |
| | integer of 15 to 1782, where both a and b correspond to the | |
| | positions of nucleotide residues shown in SEQ ID NO: 233, | |
| | and where b is greater than or equal to a + 14. | |
| 825018 | Preferably excluded from the present invention are one or | |
| | more polynucleotides comprising a nucleotide sequence | |
| | described by the general formula of a-b, where a is any | |
| | integer between I to 2194 of SEQ ID NO: 234, b is an | |
| | integer of 15 to 2208, where both a and b correspond to the | |
| | positions of nucleotide residues shown in SEQ ID NO: 234, | |
| | and where b is greater than or equal to a + 14. | |
| 825076 | Preferably excluded from the present invention are one or | |
| | more polynucleotides comprising a nucleotide sequence | |
| | described by the general formula of a-b, where a is any | |
| | integer between 1 to 2566 of SEQ ID NO: 235, b is an | |
| | integer of 15 to 2580, where both a and b correspond to the | |
| | positions of nucleotide residues shown in SEQ ID NO: 235, | |
| | and where b is greater than or equal to a + 14. | |
| 825787 | Preferably excluded from the present invention are one or | |
| | more polynucleotides comprising a nucleotide sequence | |
| | described by the general formula of a-b, where a is any | |
| | integer between 1 to 2994 of SEQ ID NO: 236, b is an | |
| | integer of 15 to 3008, where both a and b correspond to the | |
| | positions of nucleotide residues shown in SEQ ID NO: 236, | |
| | and where b is greater than or equal to a + 14. | |
| 826116 | Preferably excluded from the present invention are one or | |
| | more polynucleotides comprising a nucleotide sequence | |
| | described by the general formula of a-b, where a is any | |
| | integer between 1 to 863 of SEQ ID NO: 237, b is an integer | |
| | of 15 to 877, where both a and b correspond to the positions | |
| | of nucleotide residues shown in SEQ ID NO: 237, and | |
| | where b is greater than or equal to a + 14. | |
| 826147 | Preferably excluded from the present invention are one or | |
| | more polynucleotides comprising a nucleotide sequence | |
| | described by the general formula of a-b, where a is any | |
| | integer between 1 to 3025 of SEQ ID NO: 238, b is an | |
| | integer of 15 to 3039, where both a and b correspond to the | |
| | positions of nucleotide residues shown in SEQ ID NO: 238, | |
| | and where b is greater than or equal to a + 14. | |
| 827020 | Preferably excluded from the present invention are one or | |
| | more polynucleotides comprising a nucleotide sequence | |
| | described by the general formula of a-b, where a is any | |
| | integer between 1 to 1978 of SEQ ID NO: 239, b is an | |
| | integer of 15 to 1992, where both a and b correspond to the | |
| | positions of nucleotide residues shown in SEQ ID NO: 239, | |
| | and where b is greater than or equal to a + 14. | |
| 827586 | Preferably excluded from the present invention are one or | |
| | more polynucleotides comprising a nucleotide sequence | |
| | described by the general formula of a-b, where a is any | |
| | integer between 1 to 483 of SEQ ID NO: 240, b is an integer | |
| | of 15 to 497, where both a and b correspond to the positions | |
| | of nucleotide residues shown in SEQ ID NO: 240, and | |
| | where b is greater than or equal to a + 14. | |
| 827732 | Preferably excluded from the present invention are one or | |
| | more polynucleotides comprising a nucleotide sequence | |
| | described by the general formula of a-b, where a is any | |
| | integer between 1 to 302 of SEQ ID NO: 241, b is an integer | |
| | of 15 to 316, where both a and b correspond to the positions | |
| | of nucleotide residues shown in SEQ ID NO: 241, and | |
| | where b is greater than or equal to a + 14. | |
| 827735 | Preferably excluded from the present invention are one or | |
| | more polynucleotides comprising a nucleotide sequence | |
| | described by the general formula of a-b, where a is any | |
| | integer between 1 to 815 of SEQ ID NO: 242, b is an integer | |
| | of 15 to 829, where both a and b correspond to the positions | |
| | of nucleotide residues shown in SEQ ID NO: 242, and | |
| | where b is greater than or equal to a + 14. | |
| 827740 | Preferably excluded from the present invention are one or | R21513, R223 16, R42033, R43706, R42033, R43706, R63113, R70954, |
| | more polynucleotides comprising a nucleotide sequence | R71006, N486 18, N53377, AA9 12400 |
| | described by the general formula of a-b, where a is any | |
| | integer between 1 to 824 of SEQ ID NO: 243, b is an integer | |
| | of 15 to 838, where both a and b correspond to the positions | |
| | of nucleotide residues shown in SEQ ID NO: 243, and | |
| | where b is greater than or equal to a + 14. | |
| 827808 | Preferably excluded from the present invention are one or | |
| | more polynucleotides comprising a nucleotide sequence | |
| | described by the general formula of a-b, where a is any | |
| | integer between 1 to 2839 of SEQ ID NO: 244, b is an | |
| | integer of 15 to 2853, where both a and b correspond to the | |
| | positions of nucleotide residues shown in SEQ ID NO: 244, | |
| | and where b is greater than or equal to a + 14. | |
| 828251 | Preferably excluded from the present invention are one or | |
| | more polynucleotides comprising a nucleotide sequence | |
| | described by the general formula of a-b, where a is any | |
| | integer between 1 to 1183 of SEQ ID NO: 245, b is an | |
| | integer of 15 to 1197, where both a and b correspond to the | |
| | positions of nucleotide residues shown in SEQ ID NO: 245, | |
| | and where b is greater than or equal to a + 14. | |
| 828357 | Preferably excluded from the present invention are one or | |
| | more polynucleotides comprising a nucleotide sequence | |
| | described by the general formula of a-b, where a is any | |
| | integer between 1 to 834 of SEQ ID NO: 246, b is an integer | |
| | of 15 to 848, where both a and b correspond to the positions | |
| | of nucleotide residues shown in SEQ ID NO: 246, and | |
| | where b is greater than or equal to a + 14. | |
| 828449 | Preferably excluded from the present invention are one or | |
| | more polynucleotides comprising a nucleotide sequence | |
| | described by the general formula of a-b, where a is any | |
| | integer between 1 to 1322 of SEQ ID NO: 247, b is an | |
| | integer of 15 to 1336, where both a and b correspond to the | |
| | positions of nucleotide residues shown in SEQ ID NO: 247, | |
| | and where b is greater than or equal to a + 14. | |
| 828612 | Preferably excluded from the present invention are one or | R28513, R28661, R31336, R41867, R41867, R60004, H19945, H19946, |
| | more polynucleotides comprising a nucleotide sequence | H22061, H46271, H46342, H826 19, H826 18, N20678, W96 169, |
| | described by the general formula of a-b, where a is any | AA010842, AA278855, AA582295, AA583721, AA639735, |
| | integer between 1 to 1062 of SEQ ID NO: 248, b is an | AA579409, AA568321, AA833752, AA907437, A1054389, W22584 |
| | integer of 15 to 1076, where both a and b correspond to the | |
| | positions of nucleotide residues shown in SEQ ID NO: 248, | |
| | and where b is greater than or equal to a + 14. | |
| 828647 | Preferably excluded from the present invention are one or | |
| | more polynucleotides comprising a nucleotide sequence | |
| | described by the general formula of a-b, where a is any | |
| | integer between 1 to 2411 of SEQ ID NO: 249, b is an | |
| | integer of 15 to 2425, where both a and b correspond to the | |
| | positions of nucleotide residues shown in SEQ ID NO: 249, | |
| | and where b is greater than or equal to a + 14. | |
| 828698 | Preferably excluded from the present invention are one or | |
| | more polynucleotides comprising a nucleotide sequence | |
| | described by the general formula of a-b, where a is any | |
| | integer between 1 to 1394 of SEQ ID NO: 250, b is an | |
| | integer of 15 to 1408, where both a and b correspond to the | |
| | positions of nucleotide residues shown in SEQ ID NO: 250, | |
| | and where b is greater than or equal to a + 14. | |
| 828962 | Preferably excluded from the present invention are one or | |
| | more polynucleotides comprising a nucleotide sequence | |
| | described by the general formula of a-b, where a is any | |
| | integer between 1 to 480 of SEQ ID NO: 251, b is an integer | |
| | of 15 to 494, where both a and b correspond to the positions | |
| | of nucleotide residues shown in SEQ ID NO: 25 1, and | |
| | where b is greater than or equal to a + 14. | |
| 828982 | Preferably excluded from the present invention are one or | T64550, T65973, T94849, T94894, R07359, R07409, R34782, R35670, |
| | more polynucleotides comprising a nucleotide sequence | R35781, R56137, R56532, R64039, R66397, R67131, H01215, H02256, |
| | described by the general formula of a-b, where a is any | H02354, H03227, H04019, R94572, R94573, H51242, H60286, |
| | integer between 1 to 2477 of SEQ ID NO: 252, b is an | H65939, H72416, H72857, N22537, N24628, N24936, N33813, |
| | integer of 15 to 2491, where both a and b correspond to the | N35712, N35830, N35916, N43982, N51363, N64462, N70838, |
| | positions of nucleotide residues shown in SEQ ID NO: 252, | N75470, N75760, W01444, W05279, W57605, W58752, W72612, |
| | and where b is greater than or equal to a + 14. | W72970, W73260, W73535, W76678, W76207, W94918, W91971, |
| | | W92319, W92355, AA024690, AA024643, AA028083, AA028084, |
| | | AA028169, AA035743, AA045830, AA045917, AA081723, |
| | | AA086310, AA085740, AA102651, AA101305, AA126788, |
| | | AA126837, AA126865, AA127295, AA129688, AA129664, |
| | | AA133503, AA133504, AA132801, AA134537, AA134547, |
| | | AA186712, AA188264, AA215597, AA463977, AA464112, |
| | | AA417286, AA4173 12, AA259228, AA279952, AA2878 14, |
| | | A468227, AA468302, AA526480, AA553703, AA587072, |
| | | A635683, AA639361, AA573471, AA579754, AA579812, |
| | | AA580600, AA730425, AA74 1436, AA804629, AA829 189, |
| | | A830255, AA865594, AA885821, AA918979, AA962033, |
| | | AA985542, AA985571, AA987607, AA995783, A1075334, D79 160, |
| | | N84712, N88655, C03235, AA094028 |
| 829282 | Preferably excluded from the present invention are one or | |
| | more polynucleotides comprising a nucleotide sequence | |
| | described by the general formula of a-b, where a is any | |
| | integerbetween 1 to 1111 of SEQ ID NO: 253,bis an | |
| | integer of 15 to 1125, where both a and b correspond to the | |
| | positions of nucleotide residues shown in SEQ ID NO: 253, | |
| | and where b is greater than or equal to a + 14. | |
| 829368 | Preferably excluded from the present invention are one or | R61547, R76 124, H01565, 1102950, 1104248, H29996, 1199672, W1997 |
| | more polynucleotides comprising a nucleotide sequence | |
| | described by the general formula of a-b, where a is any | |
| | integer between 1 to 1395 of SEQ ID NO: 254, b is an | |
| | integer of 15 to 1409, where both a and b correspond to the | |
| | positions of nucleotide residues shown in SEQ 1D NO: 254, | |
| | and where b is greater than or equal to a + 14. | |
| 829751 | Preferably excluded from the present invention are one or | |
| | more polynucleotides comprising a nucleotide sequence | |
| | described by the general formula of a-b, where a is any | |
| | integer between 1 to 476 of SEQ ID NO: 255, b is an integer | |
| | of 15 to 490, where both a and b correspond to the positions | |
| | of nucleotide residues shown in SEQ ID NO: 255, and | |
| | where b is greater than or equal to a + 14. | |
| 829773 | Preferably excluded from the present invention are one or | T96982, T97094, H53488, H53861, H64894, H65486, N62304, N67480, |
| | more polynucleotides comprising a nucleotide sequence | N78709, W03409, W07598, W73770, AA025496, AA0258 12, |
| | described by the general formula of a-b, where a is any | A133948 |
| | integer between 1 to 1219 of SEQ ID NO: 256, b is an | |
| | integer of 15 to 1233, where both a and b correspond to the | |
| | positions of nucleotide residues shown in SEQ ID NO: 256, | |
| | and where b is greater than or equal to a + 14. | |
| 829934 | Preferably excluded from the present invention are one or | |
| | more polynucleotides comprising a nucleotide sequence | |
| | described by the general formula of a-b, where a is any | |
| | integer between I to 2390 of SEQ ID NO: 257, b is an | |
| | integer of 15 to 2404, where both a and b correspond to the | |
| | positions of nucleotide residues shown in SEQ ID NO: 257, | |
| | and where b is greater than or equal to a + 14. | |
| 829942 | Preferably excluded from the present invention are one or | T64541, T65964, R01423, R01424, R05277, R19450, R44699, R51779, |
| | more polynucleotides comprising a nucleotide sequence | R51780, R44699, H11322, H11349, H13859, H13911, H21393, |
| | described by the general formula of a-b, where a is any | H21437, H21890, H22117, H45982, H46047, H47137, R98886, |
| | integer between 1 to 2078 of SEQ ID NO: 258, b is an | H54491, H54854, H98744, N23465, N37080, N46155, N46396, |
| | integer of 15 to 2092, where both a and b correspond to the | N58995, N62715, N93640, W60228, W60227, W74349, W76544, |
| | positions of nucleotide residues shown in SEQ ID NO: 258, | 87768, W87883, W905 17, W90518, AA010775, AA011055, |
| | and where b is greater than or equal to a + 14. | AA029083, AA029084, AA036822, AA057660, AA075916, |
| | | AA082814, AA101057, AA130702, AA132788, AA133063, |
| | | AA147813, AA148063, AA151487, AA151511, AA173298, |
| | | AA173348, AA181036, AA187993, AA187994, AA192370, |
| | | AA192357, AA243010, AA243264, AA250948 |
| 829951 | Preferably excluded from the present invention are one or | |
| | more polynucleotides comprising a nucleotide sequence | |
| | described by the general formula of a-b, where a is any | |
| | integer between 1 to 373 of SEQ ID NO: 259, b is an integer | |
| | of 15 to 387, where both a and b correspond to the positions | |
| | of nucleotide residues shown in SEQ ID NO: 259, and | |
| | where b is greater than or equal to a + 14. | |
| 830173 | Preferably excluded from the present invention are one or | T52493, T52572, T56913, T61268, T61320, T70063, T70130, T72005, |
| | more polynucleotides comprising a nucleotide sequence | T87844, T94182, T70248, R24534, R24639, R3 1200, R64161, R64274, |
| | described by the general formula of a-b, where a is any | R70751, R70750, H16 189, H89274, H99749, N25430, N25537, |
| | integer between 1 to 3698 of SEQ ID NO: 260, b is an | N32578, N32816, N34120, N34134, N34491, N35081, N42260, |
| | integer of 15 to 3712, where both a and b correspond to the | N43821, N62152, N62798, N64065, N64169, N67362, N69808, |
| | positions of nucleotide residues shown in SEQ ID NO: 260, | N74678, N93912, N49165, W04704, W05040, W16565, W19920, |
| | and where b is greater than or equal to a + 14. | W31806, W31907, W37354, W37355, W40493, W45266, W45455, |
| | | W52925, W58628, W92222, W92345, N91265, AA027083, AA027124, |
| | | AA028969, AA029137, AA029257, AA083657, AA084297, |
| | | AA121151, AA121131, AA126957, AA127166, AA128353, |
| | | AA128495, AA128834, AA132690, AA132783, AA136553, |
| | | AA152414, AA150706, AA150808, AA156272, AA164766, |
| | | AA164767, AA171427, AA171794, AA173592, AA173949, |
| | | AA190421, AA190580, AA191383, AA224415, AA232135 |
| 830200 | Preferably excluded from the present invention are one or | AA524284, AA662477, AA887924 |
| | more polynucleotides comprising a nucleotide sequence | |
| | described by the general formula of a-b, where a is any | |
| | integer between 1 to 883 of SEQ ID NO: 261, b is an integer | |
| | of 15 to 897, where both a and b correspond to the positions | |
| | of nucleotide residues shown in SEQ ID NO: 261, and | |
| | where b is greater than or equal to a + 14. | |
| 830365 | Preferably excluded from the present invention are one or | R42905, R59718, R62419, R72182, R72228, H22520, H22519, H25889, |
| | more polynucleotides comprising a nucleotide sequence | H45643, H46451, H46992, H84483, N50834, N92573, AA022699, |
| | described by the general formula of a-b, where a is any | AA022791, AA037734, AA037735, AA040585, AA040557, |
| | integer between 1 to 1891 of SEQ ID NO: 262, b is an | AA047816, AA159187, AA159282, AA223337, AA505391, |
| | integer of 15 to 1905, where both a and b correspond to the | AA515591, AA524466, AA613383, AA627298, AA578816, |
| | positions of nucleotide residues shown in SEQ ID NO: 262, | AA769153, AA826456, AA830896, AA831083, AA837917, |
| | and where b is greater than or equal to a + 14. | AA977053, A1083822, A1090301, A1084104 |
| 830456 | Preferably excluded from the present invention are one or | T39800, T39875, T40331, T80148, R01135, R05754, R12866, R15287, |
| | more polynucleotides comprising a nucleotide sequence | R21703, R39361, H00652, H00741, H05366, H17706, H23423, R97800, |
| | described by the general formula of a-b, where a is any | R97849, N25478, N41797, N48511, N98906, W19893, W23945, |
| | integer between 1 to 1410 of SEQ ID NO: 263, b is an | W35174, W60540, W78229, W79282, W84685, AA022952, AA026821, |
| | integer of 15 to 1424, where both a and b correspond to the | AA026953, AA074956, AA075111, AA114974, AA114988, |
| | positions of nucleotide residues shown in SEQ ID NO: 263, | AA192860, AA193064 |
| | and where b is greater than or equal to a + 14. | |
| 830549 | Preferably excluded from the present invention are one or | R60171, H26796, H96303, N91699, W25137, AA069218, AA088565, |
| | more polynucleotides comprising a nucleotide sequence | AA161178 |
| | described by the general formula of a-b, where a is any | |
| | integer between 1 to 1273 of SEQ ID NO: 264, b is an | |
| | integer of 15 to 1287, where both a and b correspond to the | |
| | positions of nucleotide residues shown in SEQ ID NO: 264, | |
| | and where b is greater than or equal to a + 14. | |
| 830602 | Preferably excluded from the present invention are one or | |
| | more polynucleotides comprising a nucleotide sequence | |
| | described by the general formula of a-b, where a is any | |
| | integer between 1 to 977 of SEQ ID NO: 265, b is an integer | |
| | of 15 to 991, where both a and b correspond to the positions | |
| | of nucleotide residues shown in SEQ ID NO: 265, and | |
| | where b is greater than or equal to a + 14. | |
| 830610 | Preferably excluded from the present invention are one or | |
| | more polynucleotides comprising a nucleotide sequence | |
| | described by the general formula of a-b, where a is any | |
| | integer between 1 to 2306 of SEQ ID NO: 266, b is an | |
| | integer of 15 to 2320, where both a and b correspond to the | |
| | positions of nucleotide residues shown in SEQ ID NO: 266, | |
| | and where b is greater than or equal to a + 14. | |
| 830644 | Preferably excluded from the present invention are one or | |
| | more polynucleotides comprising a nucleotide sequence | |
| | described by the general formula of a-b, where a is any | |
| | integer between 1 to 409 of SEQ ID NO: 267, b is an integer | |
| | of 15 to 423, where both a and b correspond to the positions | |
| | of nucleotide residues shown in SEQ ID NO: 267, and | |
| | where b is greater than or equal to a + 14. | |
| 830707 | Preferably excluded from the present invention are one or | |
| | more polynucleotides comprising a nucleotide sequence | |
| | described by the general formula of a-b, where a is any | |
| | integer between 1 to 1832 of SEQ ID NO: 268, b is an | |
| | integer of 15 to 1846, where both a and b correspond to the | |
| | positions of nucleotide residues shown in SEQ ID NO: 268, | |
| | and where b is greater than or equal to a + 14. | |
| 830709 | Preferably excluded from the present invention are one or | |
| | more polynucleotides comprising a nucleotide sequence | |
| | described by the general formula of a-b, where a is any | |
| | integer between 1 to 587 of SEQ ID NO: 269, b is an integer | |
| | of 15 to 601, where both a and b correspond to the positions | |
| | of nucleotide residues shown in SEQ ID NO: 269, and | |
| | where b is greater than or equal to a + 14. | |
| 830733 | Preferably excluded from the present invention are one or | T26638, R49962, H96664, N71762, N90691, AA040156, AA128271, |
| | more polynucleotides comprising a nucleotide sequence | AA418045, AA418216, AA535799, AA583405, AA768811 |
| | described by the general formula of a-b, where a is any | |
| | integer between 1 to 866 of SEQ ID NO: 270, b is an integer | |
| | of 15 to 880, where both a and b correspond to the positions | |
| | of nucleotide residues shown in SEQ ID NO: 270, and | |
| | where b is greater than or equal to a + 14. | |
| 830768 | Preferably excluded from the present invention are one or | |
| | more polynucleotides comprising a nucleotide sequence | |
| | described by the general formula of a-b, where a is any | |
| | integer between 1 to 2470 of SEQ D NO: 271, b is an | |
| | integer of 15 to 2484, where both a and b correspond to the | |
| | positions of nucleotide residues shown in SEQ ID NO: 271, | |
| | and where b is greater than or equal to a + 14. | |
| 830855 | Preferably excluded from the present invention are one or | H17127, AA100311, AA112910, AA282249, AA578649, AA748590 |
| | more polynucleotides comprising a nucleotide sequence | |
| | described by the general formula of a-b, where a is any | |
| | integer between 1 to 737 of SEQ ID NO: 272, b is an integer | |
| | of 15 to 751, where both a and b correspond to the positions | |
| | of nucleotide residues shown in SEQ ID NO: 272, and | |
| | where b is greater than or equal to a + 14. | |
| 830949 | Preferably excluded from the present invention are one or | |
| | more polynucleotides comprising a nucleotide sequence | |
| | described by the general formula of a-b, where a is any | |
| | integer between 1 to 3295 of SEQ ID NO: 273, b is an | |
| | integer of 15 to 3309, where both a and b correspond to the | |
| | positions of nucleotide residues shown in SEQ ID NO: 273, | |
| | and where b is greater than or equal to a + 14. | |
| 830965 | Preferably excluded from the present invention are one or | |
| | more polynucleotides comprising a nucleotide sequence | |
| | described by the general formula of a-b, where a is any | |
| | integer between 1 to 829 of SEQ ID NO: 274, b is an integer | |
| | of 15 to 843, where both a and b correspond to the positions | |
| | of nucleotide residues shown in SEQ ID NO: 274, and | |
| | where b is greater than or equal to a + 14. | |
| 830973 | Preferably excluded from the present invention are one or | |
| | more polynucleotides comprising a nucleotide sequence | |
| | described by the general formula of a-b, where a is any | |
| | integer between 1 to 2014 of SEQ ID NO: 275, b is an | |
| | integer of 15 to 2028, where both a and b correspond to the | |
| | positions of nucleotide residues shown in SEQ ID NO: 275, | |
| | and where b is greater than or equal to a + 14. | |
| 830979 | Preferably excluded from the present invention are one or | |
| | more polynucleotides comprising a nucleotide sequence | |
| | described by the general formula of a-b, where a is any | |
| | integer between 1 to 1441 of SEQ ID NO: 276, b is an | |
| | integer of 15 to 1455, where both a and b correspond to the | |
| | positions of nucleotide residues shown in SEQ ID NO: 276, | |
| | and where b is greater than or equal to a + 14. | |
| 830989 | Preferably excluded from the present invention are one or | |
| | more polynucleotides comprising a nucleotide sequence | |
| | described by the general formula of a-b, where a is any | |
| | integer between 1 to 1909 of SEQ ID NO: 277, b is an | |
| | integer of 15 to 1923, where both a and b correspond to the | |
| | positions of nucleotide residues shown in SEQ ID NO: 277, | |
| | and where b is greater than or equal to a + 14. | |
| 831134 | Preferably excluded from the present invention are one or | |
| | more polynucleotides comprising a nucleotide sequence | |
| | described by the general formula of a-b, where a is any | |
| | integer between 1 to 1366 of SEQ ID NO: 278, b is an | |
| | integer of 15 to 1380, where both a and b correspond to the | |
| | positions of nucleotide residues shown in SEQ ID NO: 278, | |
| | and where b is greater than or equal to a + 14. | |
| 831200 | Preferably excluded from the present invention are one or | |
| | more polynucleotides comprising a nucleotide sequence | |
| | described by the general formula of a-b, where a is any | |
| | integer between 1 to 1004 of SEQ ID NO: 279, b is an | |
| | integer of 15 to 1018, where both a and b correspond to the | |
| | positions of nucleotide residues shown in SEQ ID NO: 279, | |
| | and where b is greater than or equal to a + 14. | |
| 831260 | Preferably excluded from the present invention are one or | R15008, R28066, R68324, H20638, N25438, N67982, N67983, N67999, |
| | more polynucleotides comprising a nucleotide sequence | N68004, N68005, N80403, N80423, N80429, N80430, AA024581, |
| | described by the general formula of a-b, where a is any | AA024582, AA024637, AA862760, AA091142 |
| | integer between 1 to 1178 of SEQ ID NO: 280, b is an | |
| | integer of 15 to 1192, where both a and b correspond to the | |
| | positions of nucleotide residues shown in SEQ ID NO: 280, | |
| | and where b is greater than or equal to a + 14. | |
| 831531 | Preferably excluded from the present invention are one or | T66624, R16038, R26139, R26353, H15795, H16285, H21749, H21945, |
| | more polynucleotides comprising a nucleotide sequence | H22698, H23978, H52286, H52523, H60184, H60227, H68044, |
| | described by the general formula of a-b, where a is any | H81748, H81749, N46859, N47179, N51722, N51808, AA031701, |
| | integer between 1 to 1741 of SEQ ID NO: 281, b is an | AA031866, AA043760, AA043761, AA081005, AA081148, |
| | integer of 15 to 1755, where both a and b correspond to the | A195519, AA470636, AA534463, AA555198, AA631348, |
| | positions of nucleotide residues shown in SEQ ID NO: 281, | AA721036, AA737025, AA761301, AA764993, AA765314, |
| | and where b is greater than or equal to a + 14. | AA765749, AA878422, U47720, C21223 |
| 831665 | Preferably excluded from the present invention are one or | |
| | more polynucleotides comprising a nucleotide sequence | |
| | described by the general formula of a-b, where a is any | |
| | integer between 1 to 1079 of SEQ ID NO: 282, b is an | |
| | integer of 15 to 1093, where both a and b correspond to the | |
| | positions of nucleotide residues shown in SEQ ID NO: 282, | |
| | and where b is greater than or equal to a + 14. | |
| 831724 | Preferably excluded from the present invention are one or | R52161, N45179, N68350, N94021, W02782, W24840, W61323, |
| | more polynucleotides comprising a nucleotide sequence | AA907441 |
| | described by the general formula of a-b, where a is any | |
| | integer between 1 to 1542 of SEQ ID NO: 283, b is an | |
| | integer of 15 to 1556, where both a and b correspond to the | |
| | positions of nucleotide residues shown in SEQ ID NO: 283, | |
| | and where b is greater than or equal to a + 14. | |
| 831884 | Preferably excluded from the present invention are one or | |
| | more polynucleotides comprising a nucleotide sequence | |
| | described by the general formula of a-b, where a is any | |
| | integer between 1 to 1015 of SEQ ID NO: 284, b is an | |
| | integer of 15 to 1029, where both a and b correspond to the | |
| | positions of nucleotide residues shown in SEQ ID NO: 284, | |
| | and where b is greater than or equal to a + 14. | |
| 831897 | Preferably excluded from the present invention are one or | AA056348, AA127534 |
| | more polynucleotides comprising a nucleotide sequence | |
| | described by the general formula of a-b, where a is any | |
| | integer between 1 to 1569 of SEQ ID NO: 285, b is an | |
| | integer of 15 to 1583, where both a and b correspond to the | |
| | positions of nucleotide residues shown in SEQ ID NO: 285, | |
| | and where b is greater than or equal to a + 14. | |
| 831922 | Preferably excluded from the present invention are one or | |
| | more polynucleotides comprising a nucleotide sequence | |
| | described by the general formula of a-b, where a is any | |
| | integer between 1 to 1163 of SEQ ID NO: 286, b is an | |
| | integer of 15 to 1177, where both a and b correspond to the | |
| | positions of nucleotide residues shown in SEQ ID NO: 286, | |
| | and where b is greater than or equal to a + 14. | |
| 831963 | Preferably excluded from the present invention are one or | |
| | more polynucleotides comprising a nucleotide sequence | |
| | described by the general formula of a-b, where a is any | |
| | integer between 1 to 492 of SEQ ID NO: 287, b is an integer | |
| | of 15 to 506, where both a and b correspond to the positions | |
| | of nucleotide residues shown in SEQ ID NO: 287, and | |
| | where b is greater than or equal to a + 14. | |
| 832074 | Preferably excluded from the present invention are one or | |
| | more polynucleotides comprising a nucleotide sequence | |
| | described by the general formula of a-b, where a is any | |
| | integer between 1 to 934 of SEQ ID NO: 288, b is an integer | |
| | of 15 to 948, where both a and b correspond to the positions | |
| | of nucleotide residues shown in SEQ ID NO: 288, and | |
| | where b is greater than or equal to a + 14. | |
| 832266 | Preferably excluded from the present invention are one or | T70612, T70879, H13555, H23264, R97792, R97842, N75850, |
| | more polynucleotides comprising a nucleotide sequence | W07434, W19866, N90056, AA043395, AA463232, AA463231 |
| | described by the general formula of a-b, where a is any | |
| | integer between 1 to 1020 of SEQ ID NO: 289, b is an | |
| | integer of 15 to 1034, where both a and b correspond to the | _____________________________________________________________ |
| | positions of nucleotide residues shown in SEQ ID NO: 289, | |
| | and where b is greater than or equal to a + 14. | |
| 832309 | Preferably excluded from the present invention are one or | |
| | more polynucleotides comprising a nucleotide sequence | |
| | described by the general formula of a-b, where a is any | |
| | integer between 1 to 3077 of SEQ ID NO: 290, b is an | |
| | integer of 15 to 3091, where both a and b correspond to the | |
| | positions of nucleotide residues shown in SEQ ID NO: 290, | |
| | and where b is greater than or equal to a + 14. | |
| 832342 | Preferably excluded from the present invention are one or | |
| | more polynucleotides comprising a nucleotide sequence | |
| | described by the general formula of a-b, where a is any | |
| | integer between 1 to 504 of SEQ ID NO: 29 1, b is an integer | |
| | of 15 to 518, where both a and b correspond to the positions | |
| | of nucleotide residues shown in SEQ ID NO: 291, and | |
| | where b is greater than or equal to a + 14. | |
| 832351 | Preferably excluded from the present invention are one or | |
| | more polynucleotides comprising a nucleotide sequence | |
| | described by the general formula of a-b, where a is any | |
| | integer between 1 to 484 of SEQ ID NO: 292, b is an integer | |
| | of 15 to 498, where both a and b correspond to the positions | |
| | of nucleotide residues shown in SEQ ID NO: 292, and | |
| | where b is greater than or equal to a + 14. | |
| 832352 | Preferably excluded from the present invention are one or | |
| | more polynucleotides comprising a nucleotide sequence | |
| | described by the general formula of a-b, where a is any | |
| | integer between 1 to 455 of SEQ ID NO: 293, b is an integer | |
| | of 15 to 469, where both a and b correspond to the positions | |
| | of nucleotide residues shown in SEQ ID NO: 293, and | |
| | where b is greater than or equal to a + 14. | |
| 832434 | Preferably excluded from the present invention are one or | |
| | more polynucleotides comprising a nucleotide sequence | |
| | described by the general formula of a-b, where a is any | |
| | integer between 1 to 654 of SEQ ID NO: 294, b is an integer | |
| | of 15 to 668, where both a and b correspond to the positions | |
| | of nucleotide residues shown in SEQ ID NO: 294, and | |
| | where b is greater than or equal to a + 14. | |
| 832490 | Preferably excluded from the present invention are one or | T86496, H24346, R84505, N26874, N98621, W04678, W04692, |
| | more polynucleotides comprising a nucleotide sequence | W24267, W93387, W94971, AA036953, AA136869, AA136799, |
| | described by the general formula of a-b, where a is any | AA147214, AA160413, AA535592, AA93 1261, AA931403, |
| | integer between 1 to 1386 of SEQ ID NO: 295, b is an | AA962726, AA992456 |
| | integer of 15 to 1400, where both a and b correspond to the | |
| | positions of nucleotide residues shown in SEQ ID NO: 295, | |
| | and where b is greater than or equal to a + 14. | |
| 832573 | Preferably excluded from the present invention are one or | |
| | more polynucleotides comprising a nucleotide sequence | |
| | described by the general formula of a-b, where a is any | |
| | integer between 1 to 946 of SEQ ID NO: 296, b is an integer | |
| | of 15 to 960, where both a and b correspond to the positions | |
| | of nucleotide residues shown in SEQ ID NO: 296, and | |
| | where b is greater than or equal to a + 14. | |
| 832580 | Preferably excluded from the present invention are one or | |
| | more polynucleotides comprising a nucleotide sequence | |
| | described by the general formula of a-b, where a is any | |
| | integer between 1 to 643 of SEQ ID NO: 297, b is an integer | |
| | of 15 to 657, where both a and b correspond to the positions | |
| | of nucleotide residues shown in SEQ ID NO: 297, and | |
| | where b is greater than or equal to a + 14. | |
| 833394 | Preferably excluded from the present invention are one or | |
| | more polynucleotides comprising a nucleotide sequence | |
| | described by the general formula of a-b, where a is any | |
| | integer between 1 to 878 of SEQ ID NO: 298, b is an integer | |
| | of 15 to 892, where both a and b correspond to the positions | |
| | of nucleotide residues shown in SEQ ID NO: 298, and | |
| | where b is greater than or equal to a + 14. | |
| 835355 | Preferably excluded from the present invention are one or | A076638, AA916592, A1088936, A1089690 |
| | more polynucleotides comprising a nucleotide sequence | |
| | described by the general formula of a-b, where a is any | |
| | integer between 1 to 1610 of SEQ ID NO: 299, b is an | |
| | integer of 15 to 1624, where both a and b correspond to the | |
| | positions of nucleotide residues shown in SEQ ID NO: 299, | |
| | and where b is greater than or equal to a + 14. | |
| 835497 | Preferably excluded from the present invention are one or | |
| | more polynucleotides comprising a nucleotide sequence | |
| | described by the general formula of a-b, where a is any | |
| | integer between 1 to 1955 of SEQ ID NO: 300, b is an | |
| | integer of 15 to 1969, where both a and b correspond to the | |
| | positions of nucleotide residues shown in SEQ ID NO: 300, | |
| | and where b is greater than or equal to a + 14. | |
| 835728 | Preferably excluded from the present invention are one or | |
| | more polynucleotides comprising a nucleotide sequence | |
| | described by the general formula of a-b, where a is any | |
| | integer between 1 to 1868 of SEQ ID NO: 301, b is an | |
| | integer of 15 to 1882, where both a and b correspond to the | |
| | positions of nucleotide residues shown in SEQ ID NO: 301, | |
| | and where b is greater than or equal to a + 14. | |
| 835978 | Preferably excluded from the present invention are one or | |
| | more polynucleotides comprising a nucleotide sequence | |
| | described by the general formula of a-b, where a is any | |
| | integer between 1 to 2790 of SEQ ID NO: 302, b is an | |
| | integer of 15 to 2804, where both a and b correspond to the | |
| | positions of nucleotide residues shown in SEQ ID NO: 302, | |
| | and where b is greater than or equal to a + 14. | |
| 836091 | Preferably excluded from the present invention are one or | R02093, R02205, R02336, R02439, R19436, R44685, R44685, R72354, |
| | more polynucleotides comprising a nucleotide sequence | H10160, H49884, H49885, N23208, N28789, N29901, N42953, |
| | described by the general formula of a-b, where a is any | N55093, N77305, N99373, W46396, W46504, AA082311, AA176281, |
| | integer between 1 to 3845 of SEQ ID NO: 303, b is an | AA176282, AA227971, AA228079, AA234964, AA234145, |
| | integer of 15 to 3859, where both a and b correspond to the | AA281787, AA281656, AA524468, AA551888, AA631173, |
| | positions of nucleotide residues shown in SEQ ID NO: 303, | AA639499, AA811344, AA830439, AA831974, AA923665, C03439, ______ and where b is greater than or equal to a + 14. AA64 1655, AA09 1346, AA400968, AA400884 |
| 836274 | Preferably excluded from the present invention are one or | T75442, R20393, R43511, R43511, R73650, R73731, R80152, R80886, |
| | more polynucleotides comprising a nucleotide sequence | H97932, H98616, N33018, N71679, N99650, AA001053, AA001089, |
| | described by the general formula of a-b, where a is any | A044947, AA044943, AA149057, AA464856, AA427892, |
| | integer between 1 to 3364 of SEQ ID NO: 304, b is an | AA228265, AA230021, AA482694, AA483691, AA484850, |
| | integer of 15 to 3378, where both a and b correspond to the | AA513037, AA516076, AA532381, AA583355, AA6 18566, |
| | positions of nucleotide residues shown in SEQ ID NO: 304, | AA577028, AA730651, AA730790, AA745667, AA829807, |
| | and where b is greater than or equal to a + 14. | AA923038, AA931937, AA932867, AA934400, AA9344 13, |
| | | AA971551, AA971743, AA972772, AA977253, AA992454, |
| | | AA994794, A1089906, A1094921, D79281, C06099, D44840, C20741, |
| | | AA283186, AA292346, AA394164 |
| 836731 | Preferably excluded from the present invention are one or | |
| | more polynucleotides comprising a nucleotide sequence | |
| | described by the general formula of a-b, where a is any | |
| | integer between I to 1000 of SEQ ID NO: 305, b is an | |
| | integer of 15 to 1014, where both a and b correspond to the | |
| | positions of nucleotide residues shown in SEQ ID NO: 305, | |
| | and where b is greater than or equal to a + 14. | |
| 838014 | Preferably excluded from the present invention are one or | |
| | more polynucleotides comprising a nucleotide sequence | |
| | described by the general formula of a-b, where a is any | |
| | integer between 1 to 2113 of SEQ ID NO: 306, b is an | |
| | integer of 15 to 2127, where both a and b correspond to the | |
| | positions of nucleotide residues shown in SEQ ID NO: 306, | |
| | and where b is greater than or equal to a + 14. | |
| 838874 | Preferably excluded from the present invention are one or | R61165, N44200 |
| | more polynucleotides comprising a nucleotide sequence | |
| | described by the general formula of a-b, where a is any | |
| | integer between 1 to 652 of SEQ ID NO: 307, b is an integer | |
| | of 15 to 666, where both a and b correspond to the positions | |
| | of nucleotide residues shown in SEQ ID NO: 307, and | |
| | where b is greater than or equal to a + 14. | |
| 839120 | Preferably excluded from the present invention are one or | T74462, R18264, H23432, AA279685, AA847441, AA904076, |
| | more polynucleotides comprising a nucleotide sequence | AA393782 |
| | described by the general formula of a-b, where a is any | |
| | integer between 1 to 2157 of SEQ ID NO: 308, b is an | |
| | integer of 15 to 2171, where both a and b correspond to the | |
| | positions of nucleotide residues shown in SEQ ID NO: 308, | |
| | and where b is greater than or equal to a + 14. | |
| 839611 | Preferably excluded from the present invention are one or | T93695, T93696, T96161, R32227, R32254, R32304, R33503, R34044, |
| | more polynucleotides comprising a nucleotide sequence | R71178, H93366, N50709, N55039, AA165143, AA199856, |
| | described by the general formula of a-b, where a is any | AA199927, AA234331, AA262892, AA423987, AA423986, |
| | integer between 1 to 6149 of SEQ ID NO: 309, b is an | AA525886, AA661602, AA731504, AA741228, AA814795, |
| | integer of 15 to 6163, where both a and b correspond to the | AA828858, AA829196, AA831198, AA834822, AA865590, |
| | positions of nucleotide residues shown in SEQ ID NO: 309, | AA886436, AA903649, D82270, D82453, D82464, AA642466, |
| | and where b is greater than or equal to a + 14. | AA219620, AA219628, AA400707, AA400674, AA421941, |
| | | AA633988, AA663219, AA663250, AA665538, AA724260, A1074714, |
| | | T26891, T26926 |
| 840138 | Preferably excluded from the present invention are one or | |
| | more polynucleotides comprising a nucleotide sequence | |
| | described by the general formula of a-b, where a is any | |
| | integer between 1 to 2072 of SEQ ID NO: 3 10, b is an | |
| | integer of 15 to 2086, where both a and b correspond to the | |
| | positions of nucleotide residues shown in SEQ ID NO: 3 10, | |
| | and where b is greater than or equal to a + 14. | |
| 840616 | Preferably excluded from the present invention are one or | |
| | more polynucleotides comprising a nucleotide sequence | |
| | described by the general formula of a-b, where a is any | |
| | integer between 1 to 2149 of SEQ ID NO: 311, b is an | |
| | integer of 15 to 2163, where both a and b correspond to the | |
| | positions of nucleotide residues shown in SEQ ID NO: 311, | |
| | more polynucleotides comprising a nucleotide sequence | |
| | described by the general formula of a-b, where a is any | |
| | integer between 1 to 1383 of SEQ ID NO: 3 12, b is an | |
| | integer of 15 to 1397, where both a and b correspond to the | |
| | positions of nucleotide residues shown in SEQ ID NO: 3 12, | |
| | and where b is greater than or equal to a + 14. | |
| 840857 | Preferably excluded from the present invention are one or | T50389, T50520, T55419, T55495, T55974, T57220, R34591, R34592, |
| | more polynucleotides comprising a nucleotide sequence | R69726, H21148, R85777, R99233, H61311, H62351, H85185, H88299, |
| | described by the general formula of a-b, where a is any | N23288, N32662, N58504, N78093, N92665, N99611, AA005068, |
| | integer between 1 to 4092 of SEQ ID NO: 3 13, b is an | AA007333, AA007334, AA036884, AA044715, AA045458, |
| | integer of 15 to 4106, where both a and b correspond to the | AA046500, AA045654, AA115936, AA121004, AA126775, |
| | positions of nucleotide residues shown in SEQ ID NO: 313, | AA133605, AA133606, AA133980, AA181633, AA182611, |
| | and where b is greater than or equal to a + 14. | AA232979, AA233365, AA459953, AA460042, AA282826, |
| | | AA285050, AA506082, AA558006, AA601060, AA767799, |
| | | AA804323, AA807029, AA807087, AA825536, AA833810, |
| | | AA922732, AA928638, AA960990, N56482, N62047, W27456, |
| | | W26569, AA092778, AA652535, AA065256, AA065257, AA450197, |
| | | AA452846, AA452986, AA705224, Z19460, AA884767, AA969488, |
| | | AA977494, A1002996, A1032008, Z28526, D20112, T19336 |
| 840862 | Preferably excluded from the present invention are one or | T94528, N40545, N46592, N92934, AA570273, AA873604, AA910827, |
| | more polynucleotides comprising a nucleotide sequence | AA932397, AA971868, A1095210, N56229, AA648290, F20835, |
| | described by the general formula of a-b, where a is any | AA629912 |
| | integer between 1 to 518 of SEQ ID NO: 3 14, b is an integer | |
| | of 15 to 532, where both a and b correspond to the positions | |
| | of nucleotide residues shown in SEQ ID NO: 314, and | |
| | where b is greater than or equal to a + 14. | |
| 840864 | Preferably excluded from the present invention are one or | R40870, R44820, H26640, W78814, W80713, AA195492, AA937549, |
| | more polynucleotides comprising a nucleotide sequence | A1085492, A1094865, AA449317, AA884600, AA909529, AA923452, |
| | described by the general formula of a-b, where a is any | AA971781, A1084795, A1089007, AA702758, AA702769 |
| | integer between 1 to 1924 of SEQ ID NO: 315, b is an | |
| | integer of 15 to 1938, where both a and b correspond to the | |
| | positions of nucleotide residues shown in SEQ ID NO: 3 15, | |
| | and where b is greater than or equal to a + 14. | |
| 840936 | Preferably excluded from the present invention are one or | |
| | more polynucleotides comprising a nucleotide sequence | |
| | described by the general formula of a-b, where a is any | |
| | integer between 1 to 804 of SEQ ID NO: 3 16, b is an integer | |
| | of 15 to 818, where both a and b correspond to the positions | |
| | of nucleotide residues shown in SEQ ID NO: 3 16, and | |
| | where b is greater than or equal to a + 14. | |
| 840938 | Preferably excluded from the present invention are one or | |
| | more polynucleotides comprising a nucleotide sequence | |
| | described by the general formula of a-b, where a is any | |
| | integer between 1 to 823 of SEQ ID NO: 3 17, b is an integer | |
| | of 15 to 837, where both a and b correspond to the positions | |
| | of nucleotide residues shown in SEQ ID NO: 3 17, and | |
| | where b is greater than or equal to a + 14. | |
| 841884 | Preferably excluded from the present invention are one or | |
| | more polynucleotides comprising a nucleotide sequence | |
| | described by the general formula of a-b, where a is any | |
| | integer between 1 to 1434 of SEQ ID NO: 3 18, b is an | |
| | integer of 15 to 1448, where both a and b correspond to the | |
| | positions of nucleotide residues shown in SEQ ID NO: 3 18, | |
| | and where b is greater than or equal to a + 14. | |
| 842241 | Preferably excluded from the present invention are one or | |
| | more polynucleotides comprising a nucleotide sequence | |
| | described by the general formula of a-b, where a is any | |
| | integer between 1 to 1479 of SEQ ID NO: 3 19, b is an | |
| | integer of 15 to 1493, where both a and b correspond to the | |
| | positions of nucleotide residues shown in SEQ ID NO: 3 19, | |
| | and where b is greater than or equal to a + 14. | |
| 843712 | Preferably excluded from the present invention are one or | R02291, N94598, W85882, AA255975 |
| | more polynucleotides comprising a nucleotide sequence | |
| | described by the general formula of a-b, where a is any | |
| | integer between 1 to 595 of SEQ ID NO: 320, b is an integer | |
| | of 15 to 609, where both a and b correspond to the positions | |
| | of nucleotide residues shown in SEQ ID NO: 320, and | |
| | where b is greater than or equal to a + 14. | |
| 844040 | Preferably excluded from the present invention are one or | W24428, AA143434, AA459809 |
| | more polynucleotides comprising a nucleotide sequence | |
| | described by the general formula of a-b, where a is any | |
| | integer between 1 to 488 of SEQ ID NO: 321, b is an integer | |
| | of 15 to 502, where both a and b correspond to the positions | |
| | of nucleotide residues shown in SEQ ID NO: 321, and | |
| | where b is greater than or equal to a + 14. | |
| 844336 | Preferably excluded from the present invention are one or | |
| | more polynucleotides comprising a nucleotide sequence | |
| | described by the general formula of a-b, where a is any | |
| | integer between 1 to 2616 of SEQ ID NO: 322, b is an | |
| | integer of 15 to 2630, where both a and b correspond to the | |
| | positions of nucleotide residues shown in SEQ ID NO: 322, | |
| | and where b is greater than or equal to a + 14. | |
| 844612 | Preferably excluded from the present invention are one or | |
| | more polynucleotides comprising a nucleotide sequence | |
| | described by the general formula of a-b, where a is any | |
| | integer between 1 to 1860 of SEQ ID NO: 323, b is an | |
| | integer of 15 to 1874, where both a and b correspond to the | |
| | positions of nucleotide residues shown in SEQ ID NO: 323, | |
| | and where b is greater than or equal to a + 14. | |
| 844617 | Preferably excluded from the present invention are one or | |
| | more polynucleotides comprising a nucleotide sequence | |
| | described by the general formula of a-b, where a is any | |
| | integer between 1 to 2311 of SEQ ID NO: 324, b is an | |
| | integer of 15 to 2325, where both a and b correspond to the | |
| | positions of nucleotide residues shown in SEQ ID NO: 324, | |
| | and where b is greater than or equal to a + 14. | |
| 845251 | Preferably excluded from the present invention are one or | T68474, AA159183, AA464447, AA424290, AA424487, AA631793, |
| | more polynucleotides comprising a nucleotide sequence | AA928390, AA946921, AA975194, AA977141, AA430527, |
| | described by the general formula of a-b, where a is any | AA430612, AA477798 |
| | integer between 1 to 771 of SEQ ID NO: 325, b is an integer | |
| | of 15 to 785, where both a and b correspond to the positions | |
| | of nucleotide residues shown in SEQ ID NO: 325, and | |
| | where b is greater than or equal to a + 14. | |
| 845764 | Preferably excluded from the present invention are one or | |
| | more polynucleotides comprising a nucleotide sequence | |
| | described by the general formula of a-b, where a is any | |
| | integer between 1 to 230 of SEQ ID NO: 326, b is an integer | |
| | of 15 to 244, where both a and b correspond to the positions | |
| | of nucleotide residues shown in SEQ ID NO: 326, and | |
| | where b is greater than or equal to a + 14. | |
| 846187 | Preferably excluded from the present invention are one or | |
| | more polynucleotides comprising a nucleotide sequence | |
| | described by the general formula of a-b, where a is any | |
| | integer between 1 to 2440 of SEQ ID NO: 327, b is an | |
| | integer of 15 to 2454, where both a and b correspond to the | |
| | positions of nucleotide residues shown in SEQ ID NO: 327, | |
| | and where b is greater than or equal to a + 14. | |

[0069] Polynucleotide and Polypeptide Variants

[0070] The present invention is directed to variants of the polynucleotide sequence disclosed in SEQ ID NO:X or the complementary strand thereto, and/or the cDNA sequence contained in a cDNA clone contained in the deposit.

[0071] The present invention also encompasses variants of the breast, ovarian, breast cancer and/or ovarian cancer polypeptide sequence disclosed in SEQ ID NO:Y, a polypeptide sequence encoded by the polynucleotide sequence in SEQ ID NO:X, and/or a polypeptide sequence encoded by the cDNA in the related cDNA clone contained in the deposit.

[0072] “Variant” refers to a polynucleotide or polypeptide differing from the polynucleotide or polypeptide of the present invention, but retaining essential properties thereof. Generally, variants are overall closely similar, and, in many regions, identical to the polynucleotide or polypeptide of the present invention.

[0073] The present invention is also directed to nucleic acid molecules which comprise, or alternatively consist of, a nucleotide sequence which is at least 80%, 85%, 90%, 95%, 96%, 97%, 98%, 99% or 100%, identical to, for example, the nucleotide coding sequence in SEQ ID NO:X or the complementary strand thereto, the nucleotide coding sequence of the related cDNA contained in a deposited library or the complementary strand thereto, a nucleotide sequence encoding the polypeptide of SEQ ID NO:Y, a nucleotide sequence encoding a polypeptide sequence encoded by the nucleotide sequence in SEQ ID NO:X, a nucleotide sequence encoding the polypeptide encoded by the cDNA in the related cDNA contained in a deposited library, and/or polynucleotide fragments of any of these nucleic acid molecules (e.g., those fragments described herein). Polypeptides encoded by these nucleic acid molecules are also encompassed by the invention. In another embodiment, the invention encompasses nucleic acid molecules which comprise or alternatively consist of, a polynucleotide which hybridizes under stringent hybridization conditions, or alternatively, under low stringency conditions, to the nucleotide coding sequence in SEQ ID NO:X, the nucleotide coding sequence of the related cDNA clone contained in a deposited library, a nucleotide sequence encoding the polypeptide of SEQ ID NO:Y, a nucleotide sequence encoding a polypeptide sequence encoded by the nucleotide sequence in SEQ ID NO:X, a nucleotide sequence encoding the polypeptide encoded by the cDNA in the related cDNA clone contained in a deposited library, and/or polynucleotide fragments of any of these nucleic acid molecules (e.g., those fragments described herein). Polynucleotides which hybridize to the complement of these nucleic acid molecules under stringent hybridization conditions or alternatively, under lower stringency conditions, are also encompassed by the invention, as are polypeptides encoded by these polynucleotides.

[0074] The present invention is also directed to polypeptides which comprise, or alternatively consist of, an amino acid sequence which is at least 80%, 85%, 90%, 95%, 96%, 97%, 98%, 99% or 100% identical to, for example, the polypeptide sequence shown in SEQ ID NO:Y, a polypeptide sequence encoded by the nucleotide sequence in SEQ ID NO:X, a polypeptide sequence encoded by the cDNA in the related cDNA clone contained in a deposited library, and/or polypeptide fragments of any of these polypeptides (e.g., those fragments described herein). Polynucleotides which hybridize to the complement of the nucleic acid molecules encoding these polypeptides under stringent hybridization conditions, or alternatively, under lower stringency conditions, are also encompassed by the invention, as are polypeptides encoded by these polynucleotides.

[0075] By a nucleic acid having a nucleotide sequence at least, for example, 95% “identical” to a reference nucleotide sequence of the present invention, it is intended that the nucleotide sequence of the nucleic acid is identical to the reference sequence except that the nucleotide sequence may include up to five point mutations per each 100 nucleotides of the reference nucleotide sequence encoding the polypeptide. In other words, to obtain a nucleic acid having a nucleotide sequence at least 95% identical to a reference nucleotide sequence, up to 5% of the nucleotides in the reference sequence may be deleted or substituted with another nucleotide, or a number of nucleotides up to 5% of the total nucleotides in the reference sequence may be inserted into the reference sequence. The query sequence may be, for example, an entire sequence referred to in Table 1, an ORF (open reading frame), or any fragment specified as described herein.

[0076] As a practical matter, whether any particular nucleic acid molecule or polypeptide is at least 80%, 85%, 90%, 95%, 96%, 97%, 98% or 99% identical to a nucleotide sequence of the present invention can be determined conventionally using known computer programs. A preferred method for determining the best overall match between a query sequence (a sequence of the present invention) and a subject sequence, also referred to as a global sequence alignment, can be determined using the FASTDB computer program based on the algorithm of Brutlag et al. (Comp. App. Biosci. 6:237-245 (1990)). In a sequence alignment the query and subject sequences are both DNA sequences. An RNA sequence can be compared by converting U's to T's. The result of said global sequence alignment is in percent identity. Preferred parameters used in a FASTDB alignment of DNA sequences to calculate percent identiy are: Matrix=Unitary, k-tuple=4, Mismatch Penalty=1, Joining Penalty=30, Randomization Group Length=0, Cutoff Score=1, Gap Penalty=5, Gap Size Penalty 0.05, Window Size=500 or the lenght of the subject nucleotide sequence, whichever is shorter.

[0077] If the subject sequence is shorter than the query sequence because of 5′ or 3′ deletions, not because of internal deletions, a manual correction must be made to the results. This is because the FASTDB program does not account for 5′ and 3′ truncations of the subject sequence when calculating percent identity. For subject sequences truncated at the 5′ or 3′ ends, relative to the query sequence, the percent identity is corrected by calculating the number of bases of the query sequence that are 5′ and 3′ of the subject sequence, which are not matched/aligned, as a percent of the total bases of the query sequence. Whether a nucleotide is matched/aligned is determined by results of the FASTDB sequence alignment. This percentage is then subtracted from the percent identity, calculated by the above FASTDB program using the specified parameters, to arrive at a final percent identity score. This corrected score is what is used for the purposes of the present invention. Only bases outside the 5′ and 3′ bases of the subject sequence, as displayed by the FASTDB alignment, which are not matched/aligned with the query sequence, are calculated for the purposes of manually adjusting the percent identity score.

[0078] For example, a 90 base subject sequence is aligned to a 100 base query sequence to determine percent identity. The deletions occur at the 5′ end of the subject sequence and therefore, the FASTDB alignment does not show a matched/alignment of the first 10 bases at 5′ end. The 10 unpaired bases represent 10% of the sequence (number of bases at the 5′ and 3′ ends not matched/total number of bases in the query sequence) so 10% is subtracted from the percent identity score calculated by the FASTDB program. If the remaining 90 bases were perfectly matched the final percent identity would be 90%. In another example, a 90 base subject sequence is compared with a 100 base query sequence. This time the deletions are internal deletions so that there are no bases on the 5′ or 3′ of the subject sequence which are not matched/aligned with the query. In this case the percent identity calculated by FASTDB is not manually corrected. Once again, only bases 5′ and 3′ of the subject sequence which are not matched/aligned with the query sequence are manually corrected for. No other manual corrections are to made for the purposes of the present invention.

[0079] By a polypeptide having an amino acid sequence at least, for example, 95% “identical” to a query amino acid sequence of the present invention, it is intended that the amino acid sequence of the subject polypeptide is identical to the query sequence except that the subject polypeptide sequence may include up to five amino acid alterations per each 100 amino acids of the query amino acid sequence. In other words, to obtain a polypeptide having an amino acid sequence at least 95% identical to a query amino acid sequence, up to 5% of the amino acid residues in the subject sequence may be inserted, deleted, (indels) or substituted with another amino acid. These alterations of the reference sequence may occur at the amino or carboxy terminal positions of the reference amino acid sequence or anywhere between those terminal positions, interspersed either individually among residues in the reference sequence or in one or more contiguous groups within the reference sequence.

[0080] As a practical matter, whether any particular polypeptide is at least 80%, 85%, 90%, 95%, 96%, 97%, 98% or 99% identical to, for instance, the amino acid sequence in SEQ ID NO:Y or a fragment thereof, the amino acid sequence encoded by the nucleotide sequence in SEQ ID NO:X or a fragment thereof, or the amino acid sequence encoded by the cDNA in the related cDNA clone contained in a deposited library, or a fragment thereof, can be determined conventionally using known computer programs. A preferred method for determing the best overall match between a query sequence (a sequence of the present invention) and a subject sequence, also referred to as a global sequence alignment, can be determined using the FASTDB computer program based on the algorithm of Brutlag et al. (Comp. App. Biosci. 6:237-245(1990)). In a sequence alignment the query and subject sequences are either both nucleotide sequences or both amino acid sequences. The result of said global sequence alignment is in percent identity. Preferred parameters used in a FASTDB amino acid alignment are: Matrix=PAM 0, k-tuple=2, Mismatch Penalty=1, Joining Penalty=20, Randomization Group Length=0, Cutoff Score=1, Window Size=sequence length, Gap Penalty=5, Gap Size Penalty=0.05, Window Size=500 or the length of the subject amino acid sequence, whichever is shorter.

[0081] If the subject sequence is shorter than the query sequence due to N- or C-terminal deletions, not because of internal deletions, a manual correction must be made to the results. This is because the FASTDB program does not account for N- and C-terminal truncations of the subject sequence when calculating global percent identity. For subject sequences truncated at the N- and C-termini, relative to the query sequence, the percent identity is corrected by calculating the number of residues of the query sequence that are N- and C-terminal of the subject sequence, which are not matched/aligned with a corresponding subject residue, as a percent of the total bases of the query sequence. Whether a residue is matched/aligned is determined by results of the FASTDB sequence alignment. This percentage is then subtracted from the percent identity, calculated by the above FASTDB program using the specified parameters, to arrive at a final percent identity score. This final percent identity score is what is used for the purposes of the present invention. Only residues to the N- and C-termini of the subject sequence, which are not matched/aligned with the query sequence, are considered for the purposes of manually adjusting the percent identity score. That is, only query residue positions outside the farthest N- and C-terminal residues of the subject sequence.

[0082] For example, a 90 amino acid residue subject sequence is aligned with a 100 residue query sequence to determine percent identity. The deletion occurs at the N-terminus of the subject sequence and therefore, the FASTDB alignment does not show a matching/alignment of the first 10 residues at the N-terminus. The 10 unpaired residues represent 10% of the sequence (number of residues at the N- and C-termini not matched/total number of residues in the query sequence) so 10% is subtracted from the percent identity score calculated by the FASTDB program. If the remaining 90 residues were perfectly matched the final percent identity would be 90%. In another example, a 90 residue subject sequence is compared with a 100 residue query sequence. This time the deletions are internal deletions so there are no residues at the N- or C-termini of the subject sequence which are not matched/aligned with the query. In this case the percent identity calculated by FASTDB is not manually corrected. Once again, only residue positions outside the N- and C-terminal ends of the subject sequence, as displayed in the FASTDB alignment, which are not matched/aligned with the query sequence are manually corrected for. No other manual corrections are to made for the purposes of the present invention.

[0083] The variants may contain alterations in the coding regions, non-coding regions, or both. Especially preferred are polynucleotide variants containing alterations which produce silent substitutions, additions, or deletions, but do not alter the properties or activities of the encoded polypeptide. Nucleotide variants produced by silent substitutions due to the degeneracy of the genetic code are preferred. Moreover, variants in which less than 50, less than 40, less than 30, less than 20, less than 10, or 5-50, 5-25, 5-10, 1-5, or 1-2 amino acids are substituted, deleted, or added in any combination are also preferred. Polynucleotide variants can be produced for a variety of reasons, e.g., to optimize codon expression for a particular host (change codons in the human mRNA to those preferred by a bacterial host such as E. coli).

[0084] Naturally occurring variants are called “allelic variants,” and refer to one of several alternate forms of a gene occupying a given locus on a chromosome of an organism. (Genes II, Lewin, B., ed., John Wiley & Sons, New York (1985).) These allelic variants can vary at either the polynucleotide and/or polypeptide level and are included in the present invention. Alternatively, non-naturally occurring variants may be produced by mutagenesis techniques or by direct synthesis.

[0085] Using known methods of protein engineering and recombinant DNA technology, variants may be generated to improve or alter the characteristics of the polypeptides of the present invention. For instance, as discussed herein, one or more amino acids can be deleted from the N-terminus or C-terminus of the polypeptide of the present invention without substantial loss of biological function. The authors of Ron et al., J. Biol. Chem. 268: 2984-2988 (1993), reported variant KGF proteins having heparin binding activity even after deleting 3, 8, or 27 amino-terminal amino acid residues. Similarly, Interferon gamma exhibited up to ten times higher activity after deleting 8-10 amino acid residues from the carboxy terminus of this protein. (Dobeli et al., J. Biotechnology 7:199-216 (1988).)

[0086] Moreover, ample evidence demonstrates that variants often retain a biological activity similar to that of the naturally occurring protein. For example, Gayle and coworkers (J. Biol. Chem 268:22105-22111 (1993)) conducted extensive mutational analysis of human cytokine IL-1a. They used random mutagenesis to generate over 3,500 individual IL-1a mutants that averaged 2.5 amino acid changes per variant over the entire length of the molecule. Multiple mutations were examined at every possible amino acid position. The investigators found that “[m]ost of the molecule could be altered with little effect on either [binding or biological activity].” (See, Abstract.) In fact, only 23 unique amino acid sequences, out of more than 3,500 nucleotide sequences examined, produced a protein that significantly differed in activity from wild-type.

[0087] Furthermore, as discussed herein, even if deleting one or more amino acids from the N-terminus or C-terminus of a polypeptide results in modification or loss of one or more biological functions, other biological activities may still be retained. For example, the ability of a deletion variant to induce and/or to bind antibodies which recognize the secreted form will likely be retained when less than the majority of the residues of the secreted form are removed from the N-terminus or C-terminus. Whether a particular polypeptide lacking N- or C-terminal residues of a protein retains such immunogenic activities can readily be determined by routine methods described herein and otherwise known in the art.

[0088] Thus, the invention further includes polypeptide variants which show a functional activity (e.g., biological activity) of the polypeptide of the invention of which they are a variant. Such variants include deletions, insertions, inversions, repeats, and substitutions selected according to general rules known in the art so as have little effect on activity.

[0089] The present application is directed to nucleic acid molecules at least 80%, 85%, 90%, 95%, 96%, 97%, 98%, 99% or 100% identical to the nucleic acid sequences disclosed herein or fragments thereof, (e.g., including but not limited to fragments encoding a polypeptide having the amino acid sequence of an N and/or C terminal deletion), irrespective of whether they encode a polypeptide having functional activity. This is because even where a particular nucleic acid molecule does not encode a polypeptide having functional activity, one of skill in the art would still know how to use the nucleic acid molecule, for instance, as a hybridization probe or a polymerase chain reaction (PCR) primer. Uses of the nucleic acid molecules of the present invention that do not encode a polypeptide having functional activity include, inter alia, (1) isolating a gene or allelic or splice variants thereof in a cDNA library; (2) in situ hybridization (e.g., “FISH”) to metaphase chromosomal spreads to provide precise chromosomal location of the gene, as described in Verma et al., Human Chromosomes: A Manual of Basic Techniques, Pergamon Press, New York (1988); and (3) Northern Blot analysis for detecting mRNA expression in specific tissues.

[0090] Preferred, however, are nucleic acid molecules having sequences at least 80%, 85%, 90%, 95%, 96%, 97%, 98%, 99% or 100% identical to the nucleic acid sequences disclosed herein, which do, in fact, encode a polypeptide having a functional activity of a polypeptide of the invention.

[0091] Of course, due to the degeneracy of the genetic code, one of ordinary skill in the art will immediately recognize that a large number of the nucleic acid molecules having a sequence at least 80%, 85%, 90%, 95%, 96%, 97%, 98%, 99%, or 100% identical to, for example, the nucleic acid sequence of the cDNA in the related cDNA clone contained in a deposited library, the nucleic acid sequence referred to in Table 1 (SEQ ID NO:X), or fragments thereof, will encode polypeptides “having functional activity.” In fact, since degenerate variants of any of these nucleotide sequences all encode the same polypeptide, in many instances, this will be clear to the skilled artisan even without performing the above described comparison assay. It will be further recognized in the art that, for such nucleic acid molecules that are not degenerate variants, a reasonable number will also encode a polypeptide having functional activity. This is because the skilled artisan is fully aware of amino acid substitutions that are either less likely or not likely to significantly effect protein function (e.g., replacing one aliphatic amino acid with a second aliphatic amino acid), as further described below.

[0092] For example, guidance concerning how to make phenotypically silent amino acid substitutions is provided in Bowie et al., “Deciphering the Message in Protein Sequences: Tolerance to Amino Acid Substitutions,” Science 247:1306-1310 (1990), wherein the authors indicate that there are two main strategies for studying the tolerance of an amino acid sequence to change.

[0093] The first strategy exploits the tolerance of amino acid substitutions by natural selection during the process of evolution. By comparing amino acid sequences in different species, conserved amino acids can be identified. These conserved amino acids are likely important for protein function. In contrast, the amino acid positions where substitutions have been tolerated by natural selection indicates that these positions are not critical for protein function. Thus, positions tolerating amino acid substitution could be modified while still maintaining biological activity of the protein.

[0094] The second strategy uses genetic engineering to introduce amino acid changes at specific positions of a cloned gene to identify regions critical for protein function. For example, site directed mutagenesis or alanine-scanning mutagenesis (introduction of single alanine mutations at every residue in the molecule) can be used. (Cunningham and Wells, Science 244:1081-1085 (1989).) The resulting mutant molecules can then be tested for biological activity.

[0095] As the authors state, these two strategies have revealed that proteins are surprisingly tolerant of amino acid substitutions. The authors further indicate which amino acid changes are likely to be permissive at certain amino acid positions in the protein. For example, most buried (within the tertiary structure of the protein) amino acid residues require nonpolar side chains, whereas few features of surface side chains are generally conserved. Moreover, tolerated conservative amino acid substitutions involve replacement of the aliphatic or hydrophobic amino acids Ala, Val, Leu and Ile; replacement of the hydroxyl residues Ser and Thr; replacement of the acidic residues Asp and Glu; replacement of the amide residues Asn and Gln, replacement of the basic residues Lys, Arg, and His; replacement of the aromatic residues Phe, Tyr, and Trp, and replacement of the small-sized amino acids Ala, Ser, Thr, Met, and Gly. Besides conservative amino acid substitution, variants of the present invention include (i) substitutions with one or more of the non-conserved amino acid residues, where the substituted amino acid residues may or may not be one encoded by the genetic code, or (ii) substitution with one or more of amino acid residues having a substituent group, or (iii) fusion of the mature polypeptide with another compound, such as a compound to increase the stability and/or solubility of the polypeptide (for example, polyethylene glycol), or (iv) fusion of the polypeptide with additional amino acids, such as, for example, an IgG Fc fusion region peptide, or leader or secretory sequence, or a sequence facilitating purification. Such variant polypeptides are deemed to be within the scope of those skilled in the art from the teachings herein.

[0096] For example, polypeptide variants containing amino acid substitutions of charged amino acids with other charged or neutral amino acids may produce proteins with improved characteristics, such as less aggregation. Aggregation of pharmaceutical formulations both reduces activity and increases clearance due to the aggregate's immunogenic activity. (Pinckard et al., Clin. Exp. Immunol. 2:331-340 (1967); Robbins et al., Diabetes 36: 838-845 (1987); Cleland et al., Crit. Rev. Therapeutic Drug Carrier Systems 10:307-377 (1993).)

[0097] A further embodiment of the invention relates to a polypeptide which comprises the amino acid sequence of a polypeptide having an amino acid sequence which contains at least one amino acid substitution, but not more than 50 amino acid substitutions, even more preferably, not more than 40 amino acid substitutions, still more preferably, not more than 30 amino acid substitutions, and still even more preferably, not more than 20 amino acid substitutions. Of course it is highly preferable for a polypeptide to have an amino acid sequence which comprises the amino acid sequence of a polypeptide of SEQ ID NO:Y, an amino acid sequence encoded by SEQ ID NO:X, and/or the amino acid sequence encoded by the cDNA in the related cDNA clone contained in a deposited library which contains, in order of ever-increasing preference, at least one, but not more than 10, 9, 8, 7, 6, 5, 4, 3, 2 or 1 amino acid substitutions. In specific embodiments, the number of additions, substitutions, and/or deletions in the amino acid sequence of SEQ ID NO:Y or fragments thereof (e.g., the mature form and/or other fragments described herein), an amino acid sequence encoded by SEQ ID NO:X or fragments thereof, and/or the amino acid sequence encoded by the cDNA in the related cDNA clone contained in a deposited library or fragments thereof, is 1-5, 5-10, 5-25, 5-50, 10-50 or 50-150, conservative amino acid substitutions are preferable.

[0098] Polynucleotide and Polypeptide Fragments

[0099] The present invention is also directed to polynucleotide fragments of the breast, ovarian, breast cancer and/or ovarian cancer polynucleotides (nucleic acids) of the invention. In the present invention, a “polynucleotide fragment” refers, for example, to a polynucleotide having a nucleic acid sequence which: is a portion of the cDNA contained in a depostied cDNA clone; or is a portion of a polynucleotide sequence encoding the polypeptide encoded by the cDNA contained in a deposited cDNA clone; or is a portion of the polynucleotide sequence in SEQ ID NO:X or the complementary strand thereto; or is a polynucleotide sequence encoding a portion of the polypeptide of SEQ ID NO:Y; or is a polynucleotide sequence encoding a portion of a polypeptide encoded by SEQ ID NO:X or the complementary strand thereto. The nucleotide fragments of the invention are preferably at least about 15 nt, and more preferably at least about 20 nt, still more preferably at least about 30 nt, and even more preferably, at least about 40 nt, at least about 50 nt, at least about 75 nt, at least about 100 nt, at least about 125 nt or at least about 150 nt in length. A fragment “at least 20 nt in length,” for example, is intended to include 20 or more contiguous bases from, for example, the sequence contained in the cDNA in a related cDNA clone contained in a deposited library, the nucleotide sequence shown in SEQ ID NO:X or the complementary stand thereto. In this context “about” includes the particularly recited value or a value larger or smaller by several (5, 4, 3, 2, or 1) nucleotides. These nucleotide fragments have uses that include, but are not limited to, as diagnostic probes and primers as discussed herein. Of course, larger fragments (e.g., at least 150, 175, 200, 250, 500, 600, 1000, or 2000 nucleotides in length) are also encompassed by the invention.

[0100] Moreover, representative examples of polynucleotide fragments of the invention, include, for example, fragments comprising, or alternatively consisting of, a sequence from about nucleotide number 1-50, 51-100, 101-150, 151-200, 201-250, 251-300, 301-350, 351-400, 401-450, 451-500, 501-550, 551-600, 651-700,701-750, 751-800, 800-850, 851-900, 901-950, 951-1000, 1001-1050, 1051-1100, 1101-1150, 1151-1200, 1201-1250, 1251-1300, 1301-1350, 1351-1400, 1401-1450, 1451-1500, 1501-1550, 1551-1600, 1601-1650, 1651-1700, 1701-1750, 1751-1800, 1801-1850, 1851-1900, 1901-1950, 1951-2000, 2001-2050, 2051-2100, 2101-2150, 2151-2200, 2201-2250, 2251-2300, 2301-2350, 2351-2400, 2401-2450, 2451-2500, 2501-2550, 2551-2600, 2601-2650, 2651-2700, 2701-2750, 2751-2800, 2801-2850, 2851-2900, 2901-2950, 2951-3000, 3001-3050, 3051-3100, 3101-3150, 3151-3200, 3201-3250, 3251-3300, 3301-3350, 3351-3400, 3401-3450, 3451-3500, 3501-3550, 3551-3600, 3601-3650, 3651-3700, 3701-3750, 3751-3800, 3801-3850, 3851-3900, 3901-3950, 3951-4000, 4001-4050, 4051-4100, 4101-4150, 4151-4200, 4201-4250, 4251-4300, 4301-4350, 4351-4400, 4401-4450, 4451-4500, 4501-4550, 4551-4600, 4601-4650, 4651-4700, 4701-4750, 4751-4800, 4801-4850, 4851-4900, 4901-4950, 4951-5000, 5001-5050, 5051-5100, 5101-5150, 5151-5200, 5201-5250, 5251-5300, 5301-5350, 5351-5400, 5401-5450, 5451-5500, 5501-5550, 5551-5600, 5601-5650, 5651-5700, 5701-5750, 5751-5800, 5801-5850, 5851-5900, 5901-5950, 5951-6000, 6001-6050, 6051-6100, 6101-6150, and 6151 to the end of SEQ ID NO:X, or the complementary strand thereto. In this context “about” includes the particularly recited range or a range larger or smaller by several (5, 4, 3, 2, or 1) nucleotides, at either terminus or at both termini. Preferably, these fragments encode a polypeptide which has a functional activity (e.g., biological activity) of the polypeptide encoded by the polynucleotide of which the sequence is a portion. More preferably, these fragments can be used as probes or primers as discussed herein. Polynucleotides which hybridize to one or more of these nucleic acid molecules under stringent hybridization conditions or alternatively, under lower stringency conditions, are also encompassed by the invention, as are polypeptides encoded by these polynucleotides or fragments.

[0101] Moreover, representative examples of polynucleotide fragments of the invention, include, for example, fragments comprising, or alternatively consisting of, a sequence from about nucleotide number 1-50, 51-100, 101-150, 151-200, 201-250, 251-300, 301-350, 351-400, 401-450, 451-500, 501-550, 551-600, 651-700,701-750, 751-800, 800-850, 851-900, 901-950, 951-1000, 1001-1050, 1051-1100, 1101-1150, 1151-1200, 1201-1250, 1251-1300, 1301-1350, 1351-1400, 1401-1450, 1451-1500, 1501-1550, 1551-1600, 1601-1650, 1651-1700, 1701-1750, 1751-1800, 1801-1850, 1851-1900, 1901-1950, 1951-2000, 2001-2050, 2051-2100, 2101-2150, 2151-2200, 2201-2250, 2251-2300, 2301-2350, 2351-2400, 2401-2450, 2451-2500, 2501-2550, 2551-2600, 2601-2650, 2651-2700, 2701-2750, 2751-2800, 2801-2850, 2851-2900, 2901-2950, 2951-3000, 3001-3050, 3051-3100, 3101-3150, 3151-3200, 3201-3250, 3251-3300, 3301-3350, 3351-3400, 3401-3450, 3451-3500, 3501-3550, 3551-3600, 3601-3650, 3651-3700, 3701-3750, 3751-3800, 3801-3850, 3851-3900, 3901-3950, 3951-4000, 4001-4050, 4051-4100, 4101-4150, 4151-4200, 4201-4250, 4251-4300, 4301-4350, 4351-4400, 4401-4450, 4451-4500, 4501-4550, 4551-4600, 4601-4650, 4651-4700, 4701-4750, 4751-4800, 4801-4850, 4851-4900, 4901-4950, 4951-5000, 5001-5050, 5051-5100, 5101-5150, 5151-5200, 5201-5250, 5251-5300, 5301-5350, 5351-5400, 5401-5450, 5451-5500, 5501-5550, 5551-5600, 5601-5650, 5651-5700, 5701-5750, 5751-5800, 5801-5850, 5851-5900, 5901-5950, 5951-6000, 6001-6050, 6051-6100, 6101-6150, and 6151 to the end of the cDNA nucleotide sequence contained in the deposited cDNA clone, or the complementary strand thereto. In this context “about” includes the particularly recited range, or a range larger or smaller by several (5, 4, 3, 2, or 1) nucleotides, at either terminus or at both termini. Preferably, these fragments encode a polypeptide which has a functional activity (e.g., biological activity) of the polypeptide encoded by the cDNA nucleotide sequence contained in the deposited cDNA clone. More preferably, these fragments can be used as probes or primers as discussed herein. Polynucleotides which hybridize to one or more of these fragments under stringent hybridization conditions or alternatively, under lower stringency conditions, are also encompassed by the invention, as are polypeptides encoded by these polynucleotides or fragments.

[0102] In the present invention, a “polypeptide fragment” refers to an amino acid sequence which is a portion of that contained in SEQ ID NO:Y, a portion of an amino acid sequence encoded by the polynucleotide sequence of SEQ ID NO:X, and/or encoded by the cDNA contained in the related cDNA clone contained in a deposited library. Protein (polypeptide) fragments may be “free-standing,” or comprised within a larger polypeptide of which the fragment forms a part or region, most preferably as a single continuous region. Representative examples of polypeptide fragments of the invention, include, for example, fragments comprising, or alternatively consisting of, an amino acid sequence from about amino acid number 1-20, 21-40, 41-60, 61-80, 81-100, 102-120, 121-140, 141-160, 161-180, 181-200, 201-220, 221-240, 241-260, 261-280, 281-300, 301-320, 321-340, 341-360, 361-380, 381-400,401-420, 421-440, 441-460, 461-480, 481-500, 501-520, 521-540, 541-560, 561-580, 581-600, 601-620, 621-640, 641-660, 661-680, 681-700, 701-720, 721-740, 741-760, 761-780, 781-800, 801-820, 821-840, 841-860, 861-880, 881-900, 901-920, 921-940, 941-960, 961-980, 981-1000, 1001-1020, 1021-1040, 1041-1060, 1061-1080, 1081-1100, 1101-1120, 1121-1140, 1141-1160, 1161-1180, 1181-1200, 1201-1220, 1221-1240, 1241-1260, 1261-1280, 1281-1300, 1301-1320, 1321-1340, 1341-1360, 1361-1380, 1381-1400, 1401-1420, 1421-1440, 1441-1460, 1461-1480, 1481-1500, 1501-1520, 1521-1540, 1541-1560, 1561-1580, 1581-1600, 1601-1620, 1621-1640, 1641-1660, 1661-1680, 1681-1700, 1701-1720, 1721-1740, 1741-1760, 1761-1780, 1781-1800, 1801-1820, 1821-1840, 1841-1860, 1861-1880, 1881-1900, 1901-1920, 1921-1940, 1941-1960, 1961-1980, and 1981 to the end of SEQ ID NO:Y. Moreover, polypeptide fragments of the invention may be at least about 10, 15, 20, 25, 30, 35, 40, 45, 50, 55, 60, 65, 70, 75, 80, 85, 90, 100, 110, 120, 130, 140, or 150 amino acids in length. In this context “about” includes the particularly recited ranges or values, or ranges or values larger or smaller by several (5, 4, 3, 2, or 1) amino acids, at either terminus or at both termini. Polynucleotides encoding these polypeptide fragments are also encompassed by the invention.

[0103] Even if deletion of one or more amino acids from the N-terminus of a protein results in modification of loss of one or more biological functions of the protein, other functional activities (e.g., biological activities, ability to multimerize, ability to bind a ligand) may still be retained. For example, the ability of shortened muteins to induce and/or bind to antibodies which recognize the complete or mature forms of the polypeptides generally will be retained when less than the majority of the residues of the complete or mature polypeptide are removed from the N-terminus. Whether a particular polypeptide lacking N-terminal residues of a complete polypeptide retains such immunologic activities can readily be determined by routine methods described herein and otherwise known in the art. It is not unlikely that a mutein with a large number of deleted N-terminal amino acid residues may retain some biological or immunogenic activities. In fact, peptides composed of as few as six amino acid residues may often evoke an immune response.

[0104] Accordingly, polypeptide fragments of the invention include the secreted protein as well as the mature form. Further preferred polypeptide fragments include the secreted protein or the mature form having a continuous series of deleted residues from the amino or the carboxy terminus, or both. For example, any number of amino acids, ranging from 1-60, can be deleted from the amino terminus of either the secreted polypeptide or the mature form. Similarly, any number of amino acids, ranging from 1-30, can be deleted from the carboxy terminus of the secreted protein or mature form. Furthermore, any combination of the above amino and carboxy terminus deletions are preferred. Similarly, polynucleotides encoding these polypeptide fragments are also preferred.

[0105] The present invention further provides polypeptides having one or more residues deleted from the amino terminus of the amino acid sequence of a polypeptide disclosed herein (e.g., a polypeptide of SEQ ID NO:Y, a polypeptide encoded by the polynucleotide sequence contained in SEQ ID NO:X, and/or a polypeptide encoded by the cDNA contained in the related cDNA clone contained in a deposited library). In particular, N-terminal deletions may be described by the general formula m-q, where q is a whole integer representing the total number of amino acid residues in a polypeptide of the invention (e.g., the polypeptide disclosed in SEQ ID NO:Y), and m is defined as any integer ranging from 2 to q−6. Polynucleotides encoding these polypeptides are also encompassed by the invention.

[0106] Also as mentioned above, even if deletion of one or more amino acids from the C-terminus of a protein results in modification of loss of one or more biological functions of the protein, other functional activities (e.g., biological activities, ability to multimerize, ability to bind a ligand) may still be retained. For example the ability of the shortened mutein to induce and/or bind to antibodies which recognize the complete or mature forms of the polypeptide generally will be retained when less than the majority of the residues of the complete or mature polypeptide are removed from the C-terminus. Whether a particular polypeptide lacking C-terminal residues of a complete polypeptide retains such immunologic activities can readily be determined by routine methods described herein and otherwise known in the art. It is not unlikely that a mutein with a large number of deleted C-terminal amino acid residues may retain some biological or immunogenic activities. In fact, peptides composed of as few as six amino acid residues may often evoke an immune response.

[0107] Accordingly, the present invention further provides polypeptides having one or more residues from the carboxy terminus of the amino acid sequence of a polypeptide disclosed herein (e.g., a polypeptide of SEQ ID NO:Y, a polypeptide encoded by the polynucleotide sequence contained in SEQ ID NO:X, and/or a polypeptide encoded by the cDNA contained in deposited cDNA clone referenced in Table 1). In particular, C-terminal deletions may be described by the general formula 1−n, where n is any whole integer ranging from 6 to q−1, and where n corresponds to the position of an amino acid residue in a polypeptide of the invention. Polynucleotides encoding these polypeptides are also encompassed by the invention.

[0108] In addition, any of the above described N- or C-terminal deletions can be combined to produce a N- and C-terminal deleted polypeptide. The invention also provides polypeptides having one or more amino acids deleted from both the amino and the carboxyl termini, which may be described generally as having residues m−n of a polypeptide encoded by SEQ ID NO:X (e.g., including, but not limited to, the preferred polypeptide disclosed as SEQ ID NO:Y), and/or the cDNA in the related cDNA clone contained in a deposited library, where n and m are integers as described above. Polynucleotides encoding these polypeptides are also encompassed by the invention.

[0109] Any polypeptide sequence contained in the polypeptide of SEQ ID NO:Y, encoded by the polynucleotide sequences set forth as SEQ ID NO:X, or encoded by the cDNA in the related cDNA clone contained in a deposited library may be analyzed to determine certain preferred regions of the polypeptide. For example, the amino acid sequence of a polypeptide encoded by a polynucleotide sequence of SEQ ID NO:X, or the cDNA in a deposited cDNA clone may be analyzed using the default parameters of the DNASTAR computer algorithm (DNASTAR, Inc., 1228 S. Park St., Madison, Wis. 53715 USA; http://www.dnastar.com/).

[0110] Polypeptide regions that may be routinely obtained using the DNASTAR computer algorithm include, but are not limited to, Garnier-Robson alpha-regions, beta-regions, turn-regions, and coil-regions, Chou-Fasman alpha-regions, beta-regions, and turn-regions, Kyte-Doolittle hydrophilic regions and hydrophobic regions, Eisenberg alpha- and beta-amphipathic regions, Karplus-Schulz flexible regions, Emini surface-forming regions and Jameson-Wolf regions of high antigenic index. Among highly preferred polynucleotides of the invention in this regard are those that encode polypeptides comprising regions that combine several structural features, such as several (e.g., 1, 2, 3 or 4) of the features set out above.

[0111] Additionally, Kyte-Doolittle hydrophilic regions and hydrophobic regions, Emini surface-forming regions, and Jameson-Wolf regions of high antigenic index (i.e., containing four or more contiguous amino acids having an antigenic index of greater than or equal to 1.5, as identified using the default parameters of the Jameson-Wolf program) can routinely be used to determine polypeptide regions that exhibit a high degree of potential for antigenicity. Regions of high antigenicity are determined from data by DNASTAR analysis by choosing values which represent regions of the polypeptide which are likely to be exposed on the surface of the polypeptide in an environment in which antigen recognition may occur in the process of initiation of an immune response.

[0112] Preferred polypeptide fragments of the invention are fragments comprising, or alternatively consisting of, an amino acid sequence that displays a functional activity of the polypeptide sequence of which the amino acid sequence is a fragment.

[0113] By a polypeptide demonstrating a “functional activity” is meant, a polypeptide capable of displaying one or more known functional activities associated with a full-length (complete) protein of the invention. Such functional activities include, but are not limited to, biological activity, antigenicity [ability to bind (or compete with a polypeptide for binding) to an anti-polypeptide antibody], immunogenicity (ability to generate antibody which binds to a specific polypeptide of the invention), ability to form multimers with polypeptides of the invention, and ability to bind to a receptor or ligand for a polypeptide.

[0114] Other preferred polypeptide fragments are biologically active fragments. Biologically active fragments are those exhibiting activity similar, but not necessarily identical, to an activity of the polypeptide of the present invention. The biological activity of the fragments may include an improved desired activity, or a decreased undesirable activity.

[0115] In preferred embodiments, polypeptides of the invention comprise, or alternatively consist of, one, two, three, four, five or more of the antigenic fragments of the polypeptide of SEQ ID NO:Y, or portions thereof. Polynucleotides encoding these polypeptides are also encompassed by the invention.

TABLE 4

| Sequence/ | |
|---|---|
| Contig ID | Epitope |
| 508678 | Preferred epitopes include those comprising a sequence shown in SEQ ID NO. 422 as |
| | residues: Gln-21 to Arg-43. |
| 508968 | Preferred epitopes include those comprising a sequence shown in SEQ ID NO. 423 as |
| | residues: Thr-1 to Lys-6. |
| 509029 | Preferred epitopes include those comprising a sequence shown in SEQ ID NO. 424 as |
| | residues: Asp-1 to Trp-8, Thr-12 to Cys-19, Pro-41 to Leu-51. |
| 522632 | Preferred epitopes include those comprising a sequence shown in SEQ ID NO. 426 as |
| | residues: Cys-69 to Asn-74, Lys-83 to Gly-89. |
| 524655 | Preferred epitopes include those comprising a sequence shown in SEQ ID NO. 427 as |
| | residues: Tyr-28 to Asn-35, Ile-45 to Lys-55. |
| 525847 | Preferred epitopes include those comprising a sequence shown in SEQ ID NO. 428 as |
| | residues: Lys-27 to Asp-33. |
| 530306 | Preferred epitopes include those comprising a sequence shown in SEQ ID NO. 429 as |
| | residues: Arg-1 to Arg-11, Tyr-21 to His-27. |
| 532818 | Preferred epitopes include those comprising a sequence shown in SEQ ID NO. 430 as |
| | residues: Pro-10 to Thr-21, Asp-32 to Thr-38, Gly-47 to Glu-60. |
| 533385 | Preferred epitopes include those comprising a sequence shown in SEQ ID NO. 431 as |
| | residues: Asn-17 to Trp-22, Pro-34 to Glu-49, His-61 to Ser-71. |
| 533532 | Preferred epitopes include those comprising a sequence shown in SEQ ID NO. 432 as |
| | residues: Glu-29 to Lys-37, Lys-110 to Ile-118, Arg-126 to Cys-135, Lys-157 to Gly- |
| | 163, Gln-188 to Trp-201, Glu-269 to Thr-278. |
| 534852 | Preferred epitopes include those comprising a sequence shown in SEQ ID NO. 433 as |
| | residues: Gln-1 to Ser-14, Thr-23 to Val-31, Cys-43 to Ala-56, Glu-58 to Ser-96, Gly- |
| | 101 to Tyr-109, Asn-143 to Tyr-148, Pro-154 to His-164, Ser-195 to Asn-201, Pro-264 |
| | to Pro-271. |
| 537910 | Preferred epitopes include those comprising a sequence shown in SEQ ID NO. 434 as |
| | residues: Pro-4 to Ala-11, Pro-110 to Arg-122. |
| 539577 | Preferred epitopes include those comprising a sequence shown in SEQ ID NO. 436 as |
| | residues: Pro-9 to Gln-19. |
| 548595 | Preferred epitopes include those comprising a sequence shown in SEQ ID NO. 439 as |
| | residues: Asp-27 to Asp-33, His-54 to Tyr-59, Ile-91 to Pro-96. |
| 549337 | Preferred epitopes include those comprising a sequence shown in SEQ ID NO. 440 as |
| | residues: Pro-38 to Asp-43, Arg-155 to Phe-162, Pro-164 to Asp-170, Pro-172 to Gly- |
| | 182. |
| 553091 | Preferred epitopes include those comprising a sequence shown in SEQ ID NO. 442 as |
| | residues: Lys-55 to Lys-62, Gln-67 to Val-76, Lys-101 to Glu-111, Lys-125 to Arg- |
| | 140, Arg-161 to Arg-166, Gln-171 to Asp-187. |
| 553827 | Preferred epitopes include those comprising a sequence shown in SEQ ID NO. 443 as |
| | residues: Glu-17 to Pro-22, Pro-70 to His-76, Thr-84 to Arg-92, Asp-109 to Tyr-117. |
| 556350 | Preferred epitopes include those comprising a sequence shown in SEQ ID NO. 444 as |
| | residues: Glu-1 to Ser-15, Phe-17 to Pro-22, Lys-116 to Arg-131. |
| 556351 | Preferred epitopes include those comprising a sequence shown in SEQ ID NO. 445 as |
| | residues: Gln-9 to Phe-23, Cys-53 to Ser-64, Glu-86 to Asp-93, Ile-100 to Glu-112, |
| | Tyr-124 to Glu-133, Ser-197 to Ser-204, Asn-208 to Glu-214, Lys-228 to Lys-233, Tyr- |
| | 248 to Lys-259, Pro-330 to Ala-335, Gln-349 to Lys-355, Ala-365 to Glu-374, Ser-376 |
| | to Ser-397. |
| 557007 | Preferred epitopes include those comprising a sequence shown in SEQ ID NO. 446 as |
| | residues: Pro-46 to Tyr-54, Pro-81 to Gly-87, Pro-97 to Gly-104, Leu-106 to Asn-116, |
| | Asn-129 to Phe-134, Lys-147 to Tyr-158, Ala-192 to Ser-199, Asp-204 to Glu-215, |
| | Gly-221 to Ser-232. |
| 558456 | Preferred epitopes include those comprising a sequence shown in SEQ ID NO. 448 as |
| | residues: Glu-19 to Tyr-24, Ser-60 to Thr-65, Thr-82 to Pro-88. |
| 558708 | Preferred epitopes include those comprising a sequence shown in SEQ ID NO. 449 as |
| | residues: Arg-13 to Ala-20, Pro-27 to Arg-32, Lys-37 to Glu-62. |
| 574789 | Preferred epitopes include those comprising a sequence shown in SEQ ID NO. 450 as |
| | residues: Gly-16 to Lys-21. |
| 578203 | Preferred epitopes include those comprising a sequence shown in SEQ ID NO. 451 as |
| | residues: Thr-7 to Arg-18. |
| 588869 | Preferred epitopes include those comprising a sequence shown in SEQ ID NO. 453 as |
| | residues: Pro-14 to Ser-19, Glu-55 to Phe-60, Asp-93 to Ser-98, Thr-138 to Tyr-144, |
| | Asn-155 to Phe-163, Arg-168 to Ser-175, Gln-205 to Lys-210, Phe-226 to Thr-233. |
| 597076 | Preferred epitopes include those comprising a sequence shown in SEQ ID NO. 454 as |
| | residues: Ser-50 to Gln-56. |
| 598656 | Preferred epitopes include those comprising a sequence shown in SEQ ID NO. 455 as |
| | residues: Ser-85 to Tyr-92, Arg-109 to Lys-114. |
| 614329 | Preferred epitopes include those comprising a sequence shown in SEQ ID NO. 457 as |
| | residues: Arg-59 to Ala-67, Asn-78 to Arg-85. |
| 620956 | Preferred epitopes include those comprising a sequence shown in SEQ ID NO. 459 as |
| | residues: Ala-11 to Gln-16. |
| 621889 | Preferred epitopes include those comprising a sequence shown in SEQ ID NO. 460 as |
| | residues: Ser-84 to Gly-99, Pro-101 to Ser-112. |
| 651784 | Preferred epitopes include those comprising a sequence shown in SEQ ID NO. 462 as |
| | residues: Gly-29 to Gly-35, Ala-37 to Ala-48. |
| 651826 | Preferred epitopes include those comprising a sequence shown in SEQ ID NO. 463 as |
| | residues: Arg-1 to Ser-16, Gln-49 to Lys-60, Glu-77 to Leu-83, Gln-91 to Arg-100, |
| | Phe-140 to Ala-154, Asp-214 to Leu-219, Ala-258 to Met-275, Ile-289 to Lys-295, Ala- |
| | 314 to Glu-320, Arg-327 to Met-332, Thr-383 to Ser-388, Ser-425 to Asp-433. |
| 653282 | Preferred epitopes include those comprising a sequence shown in SEQ ID NO. 464 as |
| | residues: Arg-12 to Ile-19, Glu-23 to Pro-29, Pro-37 to Val-45. |
| 657122 | Preferred epitopes include those comprising a sequence shown in SEQ ID NO. 465 as |
| | residues: Ala-6 to Gly-13, Arg-41 to Thr-47. |
| 661442 | Preferred epitopes include those comprising a sequence shown in SEQ ID NO. 466 as |
| | residues: Arg-6 to Ser-11, Asp-53 to Ser-59, Ala-88 to Ala-104, Thr-114 to Asn-121, |
| | Glu-128 to Val-137, Asn-144 to Thr-150, Ser-174 to Asn-180, Gly-203 to Asp-212. |
| 664914 | Preferred epitopes include those comprising a sequence shown in SEQ ID NO. 467 as |
| | residues: Pro-12 to Lys-17. |
| 666654 | Preferred epitopes include those comprising a sequence shown in SEQ ID NO. 468 as |
| | residues: Thr-5 to Leu-10, Pro-13 to Leu-24. |
| 667084 | Preferred epitopes include those comprising a sequence shown in SEQ ID NO. 469 as |
| | residues: Pro-1 to Pro-9, Gly-50 to Ser-55, Gly-80 to Ser-85, Gly-91 to Tyr-96, Arg- |
| | 144 to Gln-160, Asp-195 to Thr-202, Lys-246 to Glu-252, Met-283 to Glu-288, Glu- |
| | 292 to Glu-299, Ser-304 to Asn-310, Ala-356 to Tyr-362, Met-387 to Tyr-394, Gln-424 |
| | to Thr-431, Ser-450 to Arg-459. |
| 667380 | Preferred epitopes include those comprising a sequence shown in SEQ ID NO. 470 as |
| | residues: Pro-1 to Pro-6, Thr-134 to Gln-140, Tyr-142 to Arg-150. |
| 671315 | Preferred epitopes include those comprising a sequence shown in SEQ ID NO. 472 as |
| | residues: Ala-16 to Gly-21, Glu-28 to Gly-35. |
| 671993 | Preferred epitopes include those comprising a sequence shown in SEQ ID NO. 473 as |
| | residues: Pro-8 to Ser-23. |
| 674618 | Preferred epitopes include those comprising a sequence shown in SEQ ID NO. 474 as |
| | residues: Ile-3 to Ser-11, Arg-24 to Glu-30. |
| 675027 | Preferred epitopes include those comprising a sequence shown in SEQ ID NO. 475 as |
| | residues: His-47 to Ile-52, Ala-71 to Arg-76, Asp-78 to Lys-87. |
| 677202 | Preferred epitopes include those comprising a sequence shown in SEQ ID NO. 476 as |
| | residues: Val-45 to Gly-50, Thr-56 to Glu-64. |
| 678504 | Preferred epitopes include those comprising a sequence shown in SEQ ID NO. 477 as |
| | residues: Arg-7 to Ser-19. |
| 678985 | Preferred epitopes include those comprising a sequence shown in SEQ ID NO. 478 as |
| | residues: Lys-17 to Thr-23, Leu-26 to His-36, His-41 to Pro-56, Ala-60 to Gly-71, Lys- |
| | 77 to Ser-91, Asp-101 to Lys-109, Asp-200 to Gly-206, Asp-245 to Leu-253, Gln-262 |
| | to Phe-274. |
| 682161 | Preferred epitopes include those comprising a sequence shown in SEQ ID NO. 479 as |
| | residues: Arg-5 to Pro-11, Pro-22 to Thr-29, Trp-53 to Arg-62, Pro-69 to Gly-78, Lys- |
| | 98 to Tyr-103, Glu-144 to His-151, Pro-172 to Leu-178, Gln-193 to Glu-200. |
| 683476 | Preferred epitopes include those comprising a sequence shown in SEQ ID NO. 480 as |
| | residues: Ala-5 to Trp-19. |
| 693589 | Preferred epitopes include those comprising a sequence shown in SEQ ID NO. 482 as |
| | residues: Cys-1 to Arg-13, Pro-15 to Gly-21, Gly-54 to Ser-59, Trp-73 to Lys-78, Ser- |
| | 90 to Arg-104. |
| 694991 | Preferred epitopes include those comprising a sequence shown in SEQ ID NO. 483 as |
| | residues: Lys-1 to Thr-6, Pro-8 to Gly-19, Val-61 to Arg-66. |
| 698669 | Preferred epitopes include those comprising a sequence shown in SEQ ID NO. 485 as |
| | residues: Pro-31 to His-36, Gly-43 to Tyr-48, Glu-136 to Ser-142, Pro-178 to Arg-183, |
| | Pro-273 to Asp-278, Gly-318 to Cys-326. |
| 707357 | Preferred epitopes include those comprising a sequence shown in SEQ ID NO. 488 as |
| | residues: Gly-6 to Arg-21, Arg-89 to Asp-94. |
| 707360 | Preferred epitopes include those comprising a sequence shown in SEQ ID NO. 489 as |
| | residues: Ser-13 to Glu-26, Ser-48 to Val-55, Lys-85 to Thr-91, Asp-115 to Trp-120. |
| 707375 | Preferred epitopes include those comprising a sequence shown in SEQ ID NO. 490 as |
| | residues: Arg-1 to Gly-6, Ala-12 to Arg-19, Arg-34 to Arg-40, Arg-47 to Ala-58, Ser- |
| | 67 to Thr-80, Ser-109 to Ser-117, Asn-134 to Ser-141, Pro-175 to Arg-181, Lys-212 to |
| | Thr-218, Asp-275 to Cys-285. |
| 707754 | Preferred epitopes include those comprising a sequence shown in SEQ ID NO. 491 as |
| | residues: Val-32 to Leu-41, Asn-55 to Arg-63, Pro-104 to Ala-113. |
| 712248 | Preferred epitopes include those comprising a sequence shown in SEQ ID NO. 493 as |
| | residues: Ser-13 to Gly-20, Gln-36 to Ser-41, Pro-44 to Phe-58. |
| 715445 | Preferred epitopes include those comprising a sequence shown in SEQ ID NO. 494 as |
| | residues: Gly-23 to Thr-29, Ser-32 to Val-40, Lys-181 to Ser-188, Glu-197 to Gln-204, |
| | Arg-244 to His-249, Ala-253 to Thr-264. |
| 716362 | Preferred epitopes include those comprising a sequence shown in SEQ ID NO. 495 as |
| | residues: Cys-1 to Gly-8, Arg-71 to Ser-77, His-102 to Ser-108. |
| 716835 | Preferred epitopes include those comprising a sequence shown in SEQ ID NO. 496 as |
| | residues: Gln-7 to Glu-14, Ala-24 to Arg-41. |
| 717685 | Preferred epitopes include those comprising a sequence shown in SEQ ID NO. 498 as |
| | residues: Gly-1 to Ala-7, His-70 to Gly-76, Gln-130 to Thr-135, Thr-182 to Pro-189, |
| | Asn-259 to Leu-267, Glu-280 to Ala-289, Gln-303 to Asn-310. |
| 719755 | Preferred epitopes include those comprising a sequence shown in SEQ ID NO. 499 as |
| | residues: Asp-14 to Pro-25, Pro-59 to Glu-100, Cys-126 to Gly-145, Pro-158 to Lys- |
| | 164, Lys-176 to Leu-197, Leu-221 to Tyr-238. |
| 720389 | Preferred epitopes include those comprising a sequence shown in SEQ ID NO. 500 as |
| | residues: Thr-13 to Ala-19, Ala-26 to Pro-36, Ser-63 to Gly-68. |
| 720903 | Preferred epitopes include those comprising a sequence shown in SEQ ID NO. 501 as |
| | residues: Asn-6 to Ser-11, Ala-91 to Arg-99, Trp-107 to Tyr-113, Tyr-131 to Met-137, |
| | Asp-150 to Val-157. |
| 721562 | Preferred epitopes include those comprising a sequence shown in SEQ ID NO. 503 as |
| | residues: Asp-39 to Ile-45. |
| 722775 | Preferred epitopes include those comprising a sequence shown in SEQ ID NO. 504 as |
| | residues: Pro-34 to Ser-41, Cys-49 to Arg-55, Thr-92 to Ala-98, Thr-160 to Gly-173, |
| | Thr-194 to Pro-200, Gly-274 to Trp-282, Pro-285 to Ala-291. |
| 724463 | Preferred epitopes include those comprising a sequence shown in SEQ ID NO. 505 as |
| | residues: Glu-9 to Lys-15, Pro-23 to Tyr-33. |
| 728418 | Preferred epitopes include those comprising a sequence shown in SEQ ID NO. 507 as |
| | residues: Ala-6 to Gln-11, Ser-25 to Ser-30, Lys-63 to Gly-69, Ser-108 to Asp-118, |
| | Arg-127 to His-132, Asp-156 to Cys-161. |
| 728920 | Preferred epitopes include those comprising a sequence shown in SEQ ID NO. 508 as |
| | residues: Thr-7 to Ala-15. |
| 732958 | Preferred epitopes include those comprising a sequence shown in SEQ ID NO. 509 as |
| | residues: Thr-10 to Ala-15, Pro-63 to Ser-78, Ser-82 to Leu-94. |
| 733134 | Preferred epitopes include those comprising a sequence shown in SEQ ID NO. 510 as |
| | residues: Arg-4 to Gly-24, Lys-47 to Phe-55, Lys-61 to Ala-67, Gly-108 to Thr-114, |
| | Pro-184 to Pro-191, Pro-292 to Arg-299, Pro-355 to Glu-392. |
| 734099 | Preferred epitopes include those comprising a sequence shown in SEQ ID NO. 511 as |
| | residues: His-1 to Arg-7, Gln-15 to Ala-23, Met-43 to Gln-55. |
| 738911 | Preferred epitopes include those comprising a sequence shown in SEQ ID NO. 515 as |
| | residues: Arg-4 to Asp-10, Ser-64 to His-75, Pro-127 to Asn-136, Phe-143 to Gln-150. |
| 739226 | Preferred epitopes include those comprising a sequence shown in SEQ ID NO. 516 as |
| | residues: Asn-1 to Thr-7. |
| 739527 | Preferred epitopes include those comprising a sequence shown in SEQ ID NO. 517 as |
| | residues: Gly-1 to Arg-9, Val-28 to Gly-39, Asp-52 to Leu-60, Ala-106 to Trp-117. |
| 744331 | Preferred epitopes include those comprising a sequence shown in SEQ ID NO. 520 as |
| | residues: Ser-17 to Arg-24. |
| 744751 | Preferred epitopes include those comprising a sequence shown in SEQ ID NO. 521 as |
| | residues: Ser-8 to Val-13, Pro-34 to Cys-40, Tyr-48 to Ser-55, Gly-63 to Ser-73. |
| 745750 | Preferred epitopes include those comprising a sequence shown in SEQ ID NO. 522 as |
| | residues: Ser-2 to Glu-17. |
| 746285 | Preferred epitopes include those comprising a sequence shown in SEQ ID NO. 523 as |
| | residues: Lys-87 to Lys-92. |
| 746416 | Preferred epitopes include those comprising a sequence shown in SEQ ID NO. 524 as |
| | residues: Arg-6 to Leu-12, Tyr-18 to Asp-25. |
| 747851 | Preferred epitopes include those comprising a sequence shown in SEQ ID NO. 525 as |
| | residues: Gly-124 to Ser-129, Leu-162 to Gly-167, Val-272 to Ala-278, Lys-293 to |
| | Asp-298. |
| 751315 | Preferred epitopes include those comprising a sequence shown in SEQ ID NO. 527 as |
| | residues: Cys-12 to Pro-20. |
| 754634 | Preferred epitopes include those comprising a sequence shown in SEQ ID NO. 529 as |
| | residues: Asp-1 to Thr-10. |
| 756833 | Preferred epitopes include those comprising a sequence shown in SEQ ID NO. 531 as |
| | residues: Thr-36 to Pro-49, Glu-52 to Pro-67. |
| 756878 | Preferred epitopes include those comprising a sequence shown in SEQ ID NO. 532 as |
| | residues: Pro-8 to Lys-15, Gly-69 to Trp-75. |
| 757332 | Preferred epitopes include those comprising a sequence shown in SEQ ID NO. 533 as |
| | residues: Gln-23 to Val-31, Phe-39 to Ile-52. |
| 760835 | Preferred epitopes include those comprising a sequence shown in SEQ ID NO. 534 as |
| | residues: Phe-1 to Lys-7, Cys-82 to Ser-90. |
| 761760 | Preferred epitopes include those comprising a sequence shown in SEQ ID NO. 535 as |
| | residues: Arg-34 to Pro-39, Gly-43 to Asp-51, Gln-147 to Arg-153. |
| 762520 | Preferred epitopes include those comprising a sequence shown in SEQ ID NO. 536 as |
| | residues: His-6 to His-11, Ala-13 to Glu-18, Ala-60 to Ser-65, Ile-72 to Ser-77, Gln-95 |
| | to Phe-101, Leu-136 to Ser-142. |
| 764461 | Preferred epitopes include those comprising a sequence shown in SEQ ID NO. 537 as |
| | residues: Val-15 to Ala-22, Val-26 to Gly-38. |
| 764517 | Preferred epitopes include those comprising a sequence shown in SEQ ID NO. 538 as |
| | residues: Gly-30 to Lys-36, Gly-94 to Ala-100, Gln-150 to Gly-156, Gln-189 to Leu- |
| | 195. |
| 765132 | Preferred epitopes include those comprising a sequence shown in SEQ ID NO. 539 as |
| | residues: Asn-80 to Thr-87, Ser-165 to Leu-182, Thr-196 to His-201, Lys-271 to His- |
| | 279, Asp-286 to Gly-292, Tyr-294 to Leu-302. |
| 765667 | Preferred epitopes include those comprising a sequence shown in SEQ ID NO. 540 as |
| | residues: Pro-14 to Pro-21, Pro-30 to Pro-36. |
| 767113 | Preferred epitopes include those comprising a sequence shown in SEQ ID NO. 541 as |
| | residues: Ala-62 to Pro-73, Pro-75 to Thr-83, Thr-110 to Phe-115, Glu-142 to Asp-150, |
| | Gln-158 to Ser-167, Glu-182 to Thr-187, Ser-190 to Asp-204. |
| 767204 | Preferred epitopes include those comprising a sequence shown in SEQ ID NO. 542 as |
| | residues: Ala-22 to Met-29, Arg-45 to Phe-56, Asp-63 to Asp-71, Gly-81 to Ala-88, |
| | Gln-155 to Trp-162. |
| 767962 | Preferred epitopes include those comprising a sequence shown in SEQ ID NO. 544 as |
| | residues: Glu-126 to Gly-132, Asn-146 to Ser-158, Phe-179 to Leu-188. |
| 768040 | Preferred epitopes include those comprising a sequence shown in SEQ ID NO. 545 as |
| | residues: Pro-24 to Trp-32, Val-51 to Arg-62, Gly-84 to Asp-93, Asp-108 to Asn-120, |
| | Glu-150 to Val-158, Gly-169 to Gly-175. |
| 769956 | Preferred epitopes include those comprising a sequence shown in SEQ ID NO. 546 as |
| | residues: Pro-1 to Arg-6. |
| 770133 | Preferred epitopes include those comprising a sequence shown in SEQ ID NO. 547 as |
| | residues: Glu-1 to Ser-6. |
| 771964 | Preferred epitopes include those comprising a sequence shown in SEQ ID NO. 549 as |
| | residues: Pro-8 to Gly-15, Thr-26 to Phe-32, Thr-102 to Ser-109, Ala-112 to Thr-118, |
| | His-130 to Glu-152, Ser-161 to Ala-170, Ser-204 to His-209, Gly-221 to Ser-229, Ser- |
| | 233 to Ala-240, Glu-242 to Pro-247, Leu-251 to Gln-258, Leu-278 to Leu-285, Thr-333 |
| | to Glu-338. |
| 773387 | Preferred epitopes include those comprising a sequence shown in SEQ ID NO. 551 as |
| | residues: Lys-36 to Lys-45, Ala-59 to Arg-67, Cys-99 to Arg-108, Ala-115 to Cys-125, |
| | Arg-143 to Arg-153. |
| 773827 | Preferred epitopes include those comprising a sequence shown in SEQ ID NO. 552 as |
| | residues: Pro-1 to Ala-15, Ser-72 to His-79, Gly-89 to Tyr-105, Lys-179 to Lys-184, |
| | Arg-246 to Asp-251, Glu-302 to Lys-309, Ser-329 to Phe-341. |
| 774108 | Preferred epitopes include those comprising a sequence shown in SEQ ID NO. 553 as |
| | residues: Ala-1 to Gly-21, Pro-28 to Leu-39, Pro-48 to Asp-62, Arg-71 to Arg-78. |
| 775339 | Preferred epitopes include those comprising a sequence shown in SEQ ID NO. 555 as |
| | residues: Asp-6 to Thr-13, Asp-24 to Met-30. |
| 775582 | Preferred epitopes include those comprising a sequence shown in SEQ ID NO. 556 as |
| | residues: Gly-1 to Asn-12, Ser-69 to Glu-77. |
| 777809 | Preferred epitopes include those comprising a sequence shown in SEQ ID NO. 558 as |
| | residues: Arg-15 to Gly-25. |
| 778927 | Preferred epitopes include those comprising a sequence shown in SEQ ID NO. 559 as |
| | residues: Ala-74 to Ser-82, Asn-109 to Ala-124, Ser-147 to Ile-152, Pro-188 to Gly- |
| | 194, Arg-290 to Pro-299, Tyr-307 to Glu-319, Tyr-341 to Ile-346, Lys-423 to Ser-441, |
| | Gln-452 to Glu-465. |
| 779262 | Preferred epitopes include those comprising a sequence shown in SEQ ID NO. 560 as |
| | residues: Arg-5 to Ile-24, Gly-35 to Trp-40, Glu-42 to Thr-48, Lys-76 to Gly-95. |
| 780149 | Preferred epitopes include those comprising a sequence shown in SEQ ID NO. 562 as |
| | residues: Gly-13 to Gln-18, Pro-71 to Glu-89, Ile-134 to Asp-139, Pro-232 to Met-240. |
| 780583 | Preferred epitopes include those comprising a sequence shown in SEQ ID NO. 563 as |
| | residues: Asn-58 to Thr-64, Ile-72 to Ser-78, Gly-119 to Lys-128. |
| 780960 | Preferred epitopes include those comprising a sequence shown in SEQ ID NO. 564 as |
| | residues: Ala-7 to Ile-14, Lys-27 to Asp-35, Thr-63 to Leu-73. |
| 781469 | Preferred epitopes include those comprising a sequence shown in SEQ ID NO. 565 as |
| | residues: Pro-1 to Ala-12, Arg-27 to Gln-45, Arg-57 to Gln-64, Lys-74 to Asp-96. |
| 781771 | Preferred epitopes include those comprising a sequence shown in SEQ ID NO. 567 as |
| | residues: Glu-38 to Leu-52, Glu-64 to Lys-72, Asn-92 to Ala-102, Ala-104 to Asp-119, |
| | Pro-121 to Pro-130, Ser-165 to Ser-173. |
| 782033 | Preferred epitopes include those comprising a sequence shown in SEQ ID NO. 568 as |
| | residues: Ala-1 to Gly-19, Gln-41 to Gly-46. |
| 782105 | Preferred epitopes include those comprising a sequence shown in SEQ ID NO. 569 as |
| | residues: Leu-13 to Gly-34, Arg-77 to Pro-85, Lys-129 to Arg-135. |
| 782122 | Preferred epitopes include those comprising a sequence shown in SEQ ID NO. 570 as |
| | residues: Pro-1 to Arg-6, Ala-102 to Ala-108, Pro-148 to Asp-158, Gly-164 to Ala-171, |
| | Pro-223 to Asn-231, Pro-272 to Ser-282, Ala-294 to Pro-310, Pro-322 to Arg-327. |
| 783245 | Preferred epitopes include those comprising a sequence shown in SEQ ID NO. 572 as |
| | residues: Leu-90 to Arg-97, Ala-107 to Pro-113. |
| 783247 | Preferred epitopes include those comprising a sequence shown in SEQ ID NO. 573 as |
| | residues: Ser-2 to Leu-8. |
| 783413 | Preferred epitopes include those comprising a sequence shown in SEQ ID NO. 574 as |
| | residues: Lys-33 to Val-39. |
| 784407 | Preferred epitopes include those comprising a sequence shown in SEQ ID NO. 575 as |
| | residues: Gly-28 to Val-36. |
| 784548 | Preferred epitopes include those comprising a sequence shown in SEQ ID NO. 576 as |
| | residues: Trp-1 to Pro-9, Pro-15 to Gln-24, Pro-52 to Thr-57. |
| 785677 | Preferred epitopes include those comprising a sequence shown in SEQ ID NO. 578 as |
| | residues: Gly-7 to Gly-14. |
| 786238 | Preferred epitopes include those comprising a sequence shown in SEQ ID NO. 579 as |
| | residues: Gly-1 to Gly-8. |
| 786389 | Preferred epitopes include those comprising a sequence shown in SEQ ID NO. 580 as |
| | residues: Ser-2 to Arg-16, Gly-34 to Glu-44, Arg-62 to Gln-69, Pro-102 to Ile-108, |
| | Asp-187 to Thr-193, Leu-203 to Pro-213. |
| 786929 | Preferred epitopes include those comprising a sequence shown in SEQ ID NO. 581 as |
| | residues: Pro-2 to Trp-7, Tyr-36 to Tyr-43. |
| 786932 | Preferred epitopes include those comprising a sequence shown in SEQ ID NO. 582 as |
| | residues: Ser-18 to His-30, Thr-39 to Arg-51, Leu-59 to Thr-66, Pro-131 to Lys-136, |
| | Pro-149 to Ser-157. |
| 787078 | Preferred epitopes include those comprising a sequence shown in SEQ ID NO. 583 as |
| | residues: Glu-20 to Pro-26. |
| 787283 | Preferred epitopes include those comprising a sequence shown in SEQ ID NO. 585 as |
| | residues: Glu-7 to Arg-13, Gln-26 to Arg-34. |
| 788988 | Preferred epitopes include those comprising a sequence shown in SEQ ID NO. 587 as |
| | residues: Pro-41 to Tyr-50, Thr-70 to Lys-75. |
| 789092 | Preferred epitopes include those comprising a sequence shown in SEQ ID NO. 588 as |
| | residues: Thr-27 to Ala-34, Leu-41 to Glu-48, Glu-76 to Asn-87, Asn-110 to Leu-118, |
| | Gly-125 to Lys-133. |
| 789298 | Preferred epitopes include those comprising a sequence shown in SEQ ID NO. 589 as |
| | residues: Arg-1 to Ser-14, Glu-56 to Gly-61, Ala-92 to Gln-98, Glu-134 to Val-154. |
| 789718 | Preferred epitopes include those comprising a sequence shown in SEQ ID NO. 591 as |
| | residues: Cys-17 to Ala-24. |
| 790285 | Preferred epitopes include those comprising a sequence shown in SEQ ID NO. 594 as |
| | residues: Thr-11 to Leu-18, Leu-22 to Val-31, Trp-33 to Lys-49, Ser-63 to Glu-72, |
| | Cys-80 to Ala-91, Pro-97 to His-116. |
| 790509 | Preferred epitopes include those comprising a sequence shown in SEQ ID NO. 595 as |
| | residues: Ser-6 to His-20, Leu-22 to Gly-32, Lys-103 to Mg-111, Ser-125 to Gly-130, |
| | Glu-204 to His-210, Thr-213 to His-219, Pro-222 to Asp-244, Ser-250 to Glu-258, Arg- |
| | 263 to Arg-268. |
| 790775 | Preferred epitopes include those comprising a sequence shown in SEQ ID NO. 596 as |
| | residues: Arg-42 to Asp-48, Cys-79 to Thr-85, Leu-113 to Ser-123. |
| 790888 | Preferred epitopes include those comprising a sequence shown in SEQ ID NO. 597 as |
| | residues: Pro-14 to Asp-19, Asp-40 to Leu-45, Ser-53 to Val-58, Leu-81 to Tyr-91. |
| 791506 | Preferred epitopes include those comprising a sequence shown in SEQ ID NO. 598 as |
| | residues: Arg-1 to Gly-9, Asp-19 to His-25, Gly-51 to Glu-61. |
| 792002 | Preferred epitopes include those comprising a sequence shown in SEQ ID NO. 601 as |
| | residues: Arg-1 to Gly-6, Val-22 to Pro-35, Val-106 to Ile-112, His-118 to Gln-124, |
| | Ser-132 to Leu-145, Asn-164 to Asn-170, Arg-187 to Tyr-192. |
| 792291 | Preferred epitopes include those comprising a sequence shown in SEQ ID NO. 602 as |
| | residues: Pro-14 to Arg-31. |
| 792371 | Preferred epitopes include those comprising a sequence shown in SEQ ID NO. 603 as |
| | residues: Gly-37 to Gly-52, Pro-63 to Gly-69, Ser-74 to His-81, Ser-94 to Thr-105, |
| | Val-109 to Thr-114, Phe-165 to Ser-181, Ala-191 to Asp-196, Asn-209 to Ser-216. |
| 792660 | Preferred epitopes include those comprising a sequence shown in SEQ ID NO. 604 as |
| | residues: Thr-11 to Arg-16, Asn-78 to Asp-84. |
| 792782 | Preferred epitopes include those comprising a sequence shown in SEQ ID NO. 605 as |
| | residues: Ala-65 to Gly-81. |
| 792890 | Preferred epitopes include those comprising a sequence shown in SEQ ID NO. 606 as |
| | residues: Pro-26 to His-31, Arg-34 to Ser-44, Pro-59 to Ser-71, Leu-77 to Gly-83. |
| 792931 | Preferred epitopes include those comprising a sequence shown in SEQ ID NO. 607 as |
| | residues: Pro-3 to His-12. |
| 792943 | Preferred epitopes include those comprising a sequence shown in SEQ 1D NO. 608 as |
| | residues: Lys-3 to Tyr-9, Gly-15 to Thr-22, Leu-36 to Asp-41, Leu-67 to Lys-76, Asp- |
| | 86 to Ser-93, Tyr-174 to Asp-184, Leu-255 to Glu-260, Ile-331 to Val-337. |
| 793446 | Preferred epitopes include those comprising a sequence shown in SEQ ID NO. 611 as |
| | residues: His-1 to Gly-12. |
| 793639 | Preferred epitopes include those comprising a sequence shown in SEQ ID NO. 612 as |
| | residues: Arg-6 to Arg-13, Pro-47 to Val-52, Gln-57 to Arg-65, Arg-72 to Glu-78, Asp- |
| | 117 to Thr-124, Phe-132 to His-137. |
| 794213 | Preferred epitopes include those comprising a sequence shown in SEQ ID NO. 613 as |
| | residues: Tyr-1 to Trp-9, Thr-44 to Leu-49. |
| 795955 | Preferred epitopes include those comprising a sequence shown in SEQ ID NO. 615 as |
| | residues: Lys-60 to Lys-65, Lys-99 to Ala-104. |
| 796555 | Preferred epitopes include those comprising a sequence shown in SEQ ID NO. 617 as |
| | residues: Ser-1 to Gly-10, Gly-90 to Gly-97, Asn-185 to Arg-197, Pro-202 to Arg-211. |
| 796675 | Preferred epitopes include those comprising a sequence shown in SEQ ID NO. 618 as |
| | residues: Ser-35 to Gly-40, Ser-103 to His-109, Tyr-151 to Gly-159, Pro-216 to Glu- |
| | 224, Asn-249 to Trp-258, Pro-278 to Glu-284. |
| 796743 | Preferred epitopes include those comprising a sequence shown in SEQ ID NO. 619 as |
| | residues: Asn-1 to Gly-6, Asn-100 to Glu-106, Gln-108 to Asp-116, Asp-146 to Thr- |
| | 151, Thr-191 to Glu-198. |
| 796792 | Preferred epitopes include those comprising a sequence shown in SEQ ID NO. 620 as |
| | residues: Asn-23 to Gly-28, Cys-41 to Asp-47, Gln-82 to Glu-88. |
| 799668 | Preferred epitopes include those comprising a sequence shown in SEQ ID NO. 621 as |
| | residues: Gly-2 to Arg-10, Ile-27 to Pro-33. |
| 799669 | Preferred epitopes include those comprising a sequence shown in SEQ ID NO. 622 as |
| | residues: Gly-1 to Ser-12. |
| 799673 | Preferred epitopes include those comprising a sequence shown in SEQ ID NO. 623 as |
| | residues: Gly-1 to Ala-14, Leu-38 to Pro-46. |
| 799674 | Preferred epitopes include those comprising a sequence shown in SEQ ID NO. 624 as |
| | residues: Pro-39 to Pro-45. |
| 799678 | Preferred epitopes include those comprising a sequence shown in SEQ ID NO. 625 as |
| | residues: Lys-54 to Ser-60, Tyr-86 to His-93. |
| 799728 | Preferred epitopes include those comprising a sequence shown in SEQ ID NO. 626 as |
| | residues: Trp-7 to Gln-19. |
| 799748 | Preferred epitopes include those comprising a sequence shown in SEQ ID NO. 627 as |
| | residues: Glu-7 to Arg-12, Lys-62 to His-68. |
| 799760 | Preferred epitopes include those comprising a sequence shown in SEQ ID NO. 628 as |
| | residues: Ile-15 to Trp-22. |
| 800296 | Preferred epitopes include those comprising a sequence shown in SEQ ID NO. 630 as |
| | residues: Asn-19 to Thr-39, Glu-42 to Ile-48, Arg-55 to Asp-66, Ile-130 to Arg-135, |
| | Lys-149 to Ala-156, Glu-166 to Leu-176, Met-213 to Lys-219, Pro-233 to Pro-248, |
| | Lys-258 to Lys-263. |
| 800327 | Preferred epitopes include those comprising a sequence shown in SEQ ID NO. 631 as |
| | residues: Arg-13 to Gly-l9, Lys-32 to Glu-39, Lys-94 to Trp-100, Asn-102 to Asp-108, |
| | Ala-117 to Leu-129. |
| 800816 | Preferred epitopes include those comprising a sequence shown in SEQ ID NO. 632 as |
| | residues: Lys-1 to Ile-11, Gln-36 to Leu-46. |
| 800835 | Preferred epitopes include those comprising a sequence shown in SEQ ID NO. 633 as |
| | residues: Trp-1 to Gln-11, Gly-37 to Gln-50, Ser-109 to Gln-114, Glu-146 to Leu-155, |
| | Glu-175 to Gly-180, Thr-188 to Ser-200. |
| 805429 | Preferred epitopes include those comprising a sequence shown in SEQ ID NO. 634 as |
| | residues: Pro-6 to Ser-51, Gln-100 to Glu-107. |
| 805458 | Preferred epitopes include those comprising a sequence shown in SEQ ID NO. 635 as |
| | residues: Glu-57 to Ser-62, Thr-102 to Ser-120. |
| 805478 | Preferred epitopes include those comprising a sequence shown in SEQ ID NO. 636 as |
| | residues: Glu-31 to Glu-37, Pro-47 to Ser-52, Asn-57 to Asn-66. |
| 805805 | Preferred epitopes include those comprising a sequence shown in SEQ ID NO. 637 as |
| | residues: Arg-1 to Cys-16, Tyr-59 to Lys-68, Glu-76 to Arg-82. |
| 806486 | Preferred epitopes include those comprising a sequence shown in SEQ ID NO. 638 as |
| | residues: Phe-1 to Val-6, Pro-11 to Gly-18. |
| 806498 | Preferred epitopes include those comprising a sequence shown in SEQ ID NO. 639 as |
| | residues: Pro-6 to Ser-17, Arg-81 to Thr-88, Arg-198 to Val-203, Arg-285 to Arg-296, |
| | Gln-302 to Ser-361, Leu-399 to Ser-407. |
| 810870 | Preferred epitopes include those comprising a sequence shown in SEQ ID NO. 641 as |
| | residues: Val-12 to Ile-21. |
| 811730 | Preferred epitopes include those comprising a sequence shown in SEQ ID NO. 642 as |
| | residues: Arg-33 to Arg-40. |
| 813262 | Preferred epitopes include those comprising a sequence shown in SEQ ID NO. 645 as |
| | residues: Gly-31 to Asp-51, Cys-68 to Val-81, Leu-85 to Cys-92. |
| 815637 | Preferred epitopes include those comprising a sequence shown in SEQ ID NO. 646 as |
| | residues: Arg-13 to Asp-19, Ser-80 to Gly-91, Pro-99 to Ser-111. |
| 815853 | Preferred epitopes include those comprising a sequence shown in SEQ ID NO. 647 as |
| | residues: Cys-25 to Ser-31, Gln-63 to Asp-73, Arg-98 to Gly-106, Pro-120 to Arg-125, |
| | Leu-136 to Asp-141, Gly-155 to Glu-170, Phe-179 to Gly-186. |
| 815999 | Preferred epitopes include those comprising a sequence shown in SEQ ID NO. 648 as |
| | residues: Asp-1 to Asp-10, Arg-19 to Glu-28, Gly-86 to Leu-93, Arg-113 to His-118. |
| 823427 | Preferred epitopes include those comprising a sequence shown in SEQ iD NO. 649 as |
| | residues: Pro-16 to Cys-27, Arg-70 to Arg-76. |
| 823704 | Preferred epitopes include those comprising a sequence shown in SEQ ID NO. 650 as |
| | residues: Val-29 to Lys-34, Arg-58 to His-63, Gln-87 to Lys-97, Arg-195 to Ser-200. |
| 824798 | Preferred epitopes include those comprising a sequence shown in SEQ ID NO. 651 as |
| | residues: Thr-28 to His-34. |
| 825018 | Preferred epitopes include those comprising a sequence shown in SEQ ID NO. 652 as |
| | residues: Gln-1 to Asn-11, Leu-19 to Thr-24, Lys-47 to Arg-55, Lys-94 to Asp-99, Ala- |
| | 101 to Arg-107, Ala-137 to Tyr-146, Gln-150 to Ser-163, Gly-169 to Lys-175, Thr-182 |
| | to Ala-189, Glu-249 to Ser-258, Pro-266 to Tyr-275, Tyr-285 to Gly-298, Asp-302 to |
| | Gln-315, Tyr-318 to Thr-325, Gln-332 to Ala-359, Ser-372 to Phe-384, Leu-390 to Ala- |
| | 399, Ala-428 to Arg-437. |
| 825787 | Preferred epitopes include those comprising a sequence shown in SEQ ID NO. 654 as |
| | residues: Pro-21 to Leu-28, Arg-40 to Ile-49, Asp-84 to Asn-93, Arg-124 to Asn-130, |
| | Gly-140 to Asn-145, Leu-187 to Gln-196, Pro-208 to Asp-213, Arg-244 to Asp-252, |
| | Ile-325 to Gln-336, Glu-372 to Ala-379, Asn-435 to Leu-446, Ala-460 to Arg-467, Val- |
| | 500 to Asp-506, Lys-524 to Asn-533, Thr-592 to Lys-598, Asp-648 to Ser-656. |
| 826116 | Preferred epitopes include those comprising a sequence shown in SEQ ID NO. 655 as |
| | residues: Glu-20 to Cys-35. |
| 826147 | Preferred epitopes include those comprising a sequence shown in SEQ ID NO. 656 as |
| | residues: Lys-18 to Leu-24. |
| 827586 | Preferred epitopes include those comprising a sequence shown in SEQ ID NO. 658 as |
| | residues: Ser-7 to Gly-14, Leu-22 to Ala-28, Thr-57 to Ser-62. |
| 827735 | Preferred epitopes include those comprising a sequence shown in SEQ ID NO. 660 as |
| | residues: Pro-2 to Ser-12, Gln-25 to Glu-31, Val-40 to Arg-45. |
| 827740 | Preferred epitopes include those comprising a sequence shown in SEQ ID NO. 661 as |
| | residues: Ile-22 to Lys-28. |
| 827808 | Preferred epitopes include those comprising a sequence shown in SEQ ID NO. 662 as |
| | residues: Glu-2 to Gln-13, Gln-20 to Gly-29, Arg-32 to Cys-47, Pro-54 to Trp-61, Thr- |
| | 73 to Gln-91, Gly-96 to Ser-103. |
| 828357 | Preferred epitopes include those comprising a sequence shown in SEQ ID NO. 664 as |
| | residues: Gly-1 to Gly-10, Val-25 to Glu-32, His-67 to Arg-73. |
| 828612 | Preferred epitopes include those comprising a sequence shown in SEQ ID NO. 666 as |
| | residues: Asp-25 to Gln-31, Asp-36 to Tyr-41, Gln-43 to Thr-48, Lys-71 to Thr-76. |
| 828647 | Preferred epitopes include those comprising a sequence shown in SEQ ID NO. 667 as |
| | residues: Ser-2 to Ser-8, Arg-61 to Gln-74, Ser-192 to Asn-202, Gln-229 to Lys-236, |
| | Gly-281 to Gly-292, Glu-333 to Ala-345, Ala-352 to Gln-358, Glu-360 to Leu-366, |
| | Asp-443 to Ser-449, Glu-452 to Glu-459, Asp-485 to Thr-492, Ala-510 to Gln-516, |
| | Ala-545 to Ala-552, Leu-560 to Thr-566, Glu-586 to Ala-592, Asp-601 to Gln-607, |
| | Leu-609 to Leu-620. |
| 828698 | Preferred epitopes include those comprising a sequence shown in SEQ ID NO. 668 as |
| | residues: Pro-28 to Ser-43, Pro-45 to Ala-50, His-58 to Gln-63. |
| 828962 | Preferred epitopes include those comprising a sequence shown in SEQ ID NO. 669 as |
| | residues: Ala-42 to Gly-49, Thr-54 to Cys-63. |
| 829282 | Preferred epitopes include those comprising a sequence shown in SEQ ID NO. 671 as |
| | residues: Ser-7 to Gln-12, Gly-25 to Gly-31, Gly-71 to Gly-84, Leu-147 to Glu-164, |
| | Trp-172 to Leu-180. |
| 829368 | Preferred epitopes include those comprising a sequence shown in SEQ ID NO. 672 as |
| | residues: Glu-1 to Tyr-7, Pro-13 to Glu-24, Arg-31 to Ile-39, Gln-59 to Lys-65, His-67 |
| | to Leu-74. |
| 829751 | Preferred epitopes include those comprising a sequence shown in SEQ ID NO. 673 as |
| | residues: Ala-29 to Arg-45, Ser-48 to Glu-59, Lys-73 to Trp-79, Ala-100 to Ser-109. |
| 829934 | Preferred epitopes include those comprising a sequence shown in SEQ ID NO. 675 as |
| | residues: Arg-1 to Arg-6, Ser-46 to Asp-71, Glu-76 to Glu-90, Gln-107 to Tyr-118, |
| | Ser-124 to Asp-131, Glu-163 to Asp-170, Ala-239 to Asp-245, Asp-262 to Arg-268, |
| | Gln-276 to Asp-283, Arg-293 to Lys-300, Ser-307 to Glu-313, Phe-346 to Phe-351, |
| | Phe-361 to Ala-373. |
| 829951 | Preferred epitopes include those comprising a sequence shown in SEQ ID NO. 677 as |
| | residues: Thr-21 to Lys-28. |
| 830173 | Preferred epitopes include those comprising a sequence shown in SEQ ID NO. 678 as |
| | residues: Gly-51 to Asn-68, Thr-75 to Lys-82, Ala-86 to Ala-97, Asn-99 to Arg-106, |
| | Leu-121 to Phe-126, Ala-155 to Ser-163, Asp-175 to Asp-180, Ala-184 to Phe-196, |
| | Leu-204 to Asn-214, Asp-219 to Gln-232, Leu-269 to Arg-274, Pro-392 to Pro-400, |
| | Phr-430 to Asn-437, Tyr-472 to Gln-477, Leu-483 to Gln-499, Asn-516 to Gln-524, |
| | Ser-533 to Gln-546, Lys-562 to Glu-576, Leu-589 to Ala-594, Asp-624 to Ala-633, Ile- |
| | 741 to Asp-746, Val-817 to Lys-839, Tyr-872 to Lys-878, Thr-929 to Asp-940. |
| 830365 | Preferred epitopes include those comprising a sequence shown in SEQ ID NO. 680 as |
| | residues: Trp-36 to Glu-41, Asp-71 to Arg-76, Asn-80 to Gly-87, Arg-103 to Pro-115. |
| 830456 | Preferred epitopes include those comprising a sequence shown in SEQ ID NO. 681 as |
| | residues: Leu-48 to Cys-54. |
| 830549 | Preferred epitopes include those comprising a sequence shown in SEQ ID NO. 682 as |
| | residues: Ser-1 to Pro-24, Pro-40 to Thr-50, Glu-62 to Gly-83, Arg-103 to Leu-108, |
| | Ser-141 to Lys-146, Lys-184 to Ser-190. |
| 830602 | Preferred epitopes include those comprising a sequence shown in SEQ ID NO. 683 as |
| | residues: Arg-53 to Thr-63, Ile-100 to Lys-108. |
| 830610 | Preferred epitopes include those comprising a sequence shown in SEQ ID NO. 684 as |
| | residues: Pro-27 to Cys-32, Ala-61 to Gly-70, Pro-76 to Gly-85, Met-115 to Gly-120, |
| | Glu-162 to Lys-171, Pro-222 to Tyr-228, Glu-242 to Thr-248, Lys-261 to Gly-269. |
| 830644 | Preferred epitopes include those comprising a sequence shown in SEQ ID NO. 685 as |
| | residues: Ile-1 to Ser-10. |
| 830707 | Preferred epitopes include those comprising a sequence shown in SEQ ID NO. 686 as |
| | residues: Asn-34 to Leu-53, Gln-61 to Leu-67. |
| 830709 | Preferred epitopes include those comprising a sequence shown in SEQ ID NO. 687 as |
| | residues: Arg-13 to Gln-18, Pro-22 to Ala-40, Ala-66 to Asp-84, Glu-94 to Arg-101. |
| 830733 | Preferred epitopes include those comprising a sequence shown in SEQ ID NO. 688 as |
| | residues: Glu-1 to Asp-8. |
| 830855 | Preferred epitopes include those comprising a sequence shown in SEQ ID NO. 690 as |
| | residues: Ser-1 to His-6. |
| 830949 | Preferred epitopes include those comprising a sequence shown in SEQ ID NO. 691 as |
| | residues: Arg-5 to Arg-12, Gly-25 to Trp-30, Thr-77 to Trp-96, Thr-101 to Glu-106, |
| | Gly-109 to Arg-127. |
| 830965 | Preferred epitopes include those comprising a sequence shown in SEQ ID NO. 692 as |
| | residues: Leu-24 to Arg-56, Pro-83 to Arg-90, Ile-110 to Ile-115, Lys-123 to Val-136. |
| 830973 | Preferred epitopes include those comprising a sequence shown in SEQ ID NO. 693 as |
| | residues: Ser-1 to Asn-7, Tyr-13 to Asp-23. |
| 830989 | Preferred epitopes include those comprising a sequence shown in SEQ ID NO. 695 as |
| | residues: Cys-2 to Ser-16, Glu-55 to Lys-61, Pro-83 to Leu-88, Ser-135 to Pro-148, |
| | Val-152 to Arg-163, Pro-223 to Thr-230, Ala-242 to Val-253, Arg-258 to Glu-274, Gly- |
| | 290 to Asp-300, Lys-337 to Asn-345, Asp-373 to Ala-398, Gly-401 to Lys-406, Gln- |
| | 410 to Ala-430, Pro-433 to Gln-460. |
| 831134 | Preferred epitopes include those comprising a sequence shown in SEQ ID NO. 696 as |
| | residues: Ala-19 to His-24. |
| 831200 | Preferred epitopes include those comprising a sequence shown in SEQ ID NO. 697 as |
| | residues: Trp-1 to Gly-6. |
| 831531 | Preferred epitopes include those comprising a sequence shown in SEQ ID NO. 699 as |
| | residues: Ser-94 to Asn-116, Glu-139 to Asp-155, Tyr-190 to Leu-195, Ile-230 to Ile- |
| | 235, Ser-309 to Glu-317. |
| 831665 | Preferred epitopes include those comprising a sequence shown in SEQ ID NO. 700 as |
| | residues: Leu-4 to Trp-12. |
| 831724 | Preferred epitopes include those comprising a sequence shown in SEQ ID NO. 701 as |
| | residues: Pro-26 to Lys-32. |
| 831884 | Preferred epitopes include those comprising a sequence shown in SEQ lD NO. 702 as |
| | residues: Pro-46 to Ala-52, Thr-68 to Trp-86, Arg-91 to Arg-96, Lys-127 to Asp-141. |
| 831897 | Preferred epitopes include those comprising a sequence shown in SEQ ID NO. 703 as |
| | residues: Pro-10 to Ser-20, Val-73 to Ser-78, Asp-123 to Glu-134, Leu-138 to Val-149, |
| | Ala-181 to Ala-187, Thr-189 to Val-196, Arg-213 to Gln-224. |
| 831922 | Preferred epitopes include those comprising a sequence shown in SEQ ID NO. 704 as |
| | residues: Leu-32 to Asp-37, Ile-43 to Asn-49. |
| 832266 | Preferred epitopes include those comprising a sequence shown in SEQ ID NO. 707 as |
| | residues: Ala-73 to Arg-79. |
| 832309 | Preferred epitopes include those comprising a sequence shown in SEQ ID NO. 708 as |
| | residues: Val-10 to Gly-15, Ser-98 to Thr-105. |
| 832342 | Preferred epitopes include those comprising a sequence shown in SEQ ID NO. 709 as |
| | residues: Pro-9 to Trp-16, Thr-66 to Ser-72. |
| 832351 | Preferred epitopes include those comprising a sequence shown in SEQ ID NO. 710 as |
| | residues: Asp-16 to Val-21, Leu-54 to Asp-71. |
| 832352 | Preferred epitopes include those comprising a sequence shown in SEQ ID NO. 711 as |
| | residues: Asp-16 to Val-21, Leu-33 to Asp-50. |
| 832434 | Preferred epitopes include those comprising a sequence shown in SEQ ID NO. 712 as |
| | residues: Tyr-15 to Glu-23, Ser-46 to Arg-51, Gln-56 to Trp-61, Pro-79 to Lys-86. |
| 832490 | Preferred epitopes include those comprising a sequence shown in SEQ ID NO. 713 as |
| | residues: Arg-16 to Gly-23, Ala-37 to Asp-46, Asp-91 to Asp-97. |
| 832573 | Preferred epitopes include those comprising a sequence shown in SEQ ID NO. 714 as |
| | residues: Ala-9 to Gln-16, Glu-21 to Arg-27, Gly-66 to Pro-72. |
| 833394 | Preferred epitopes include those comprising a sequence shown in SEQ ID NO. 716 as |
| | residues: Glu-1 to Gly-6, Asp-12 to Gly-22, Ile-28 to Gln-33, Cys-86 to Gly-92, Gly-96 |
| | to Ile-105. |
| 835355 | Preferred epitopes include those comprising a sequence shown in SEQ ID NO. 717 as |
| | residues: Glu-8 to Ser-15, Gly-42 to Leu-49, Pro-73 to Gly-79, Tyr-82 to Arg-87, Ser- |
| | 109 to Gly-118, Glu-122 to Ile-128, Asp-132 to Gly-137, Asp-146 to Arg-151, Pro-153 |
| | to Lys-158, Gly-191 to His-197, Tyr-210 to Ser-218, Lys-234 to Gly-239, Ala-246 to |
| | Ala-252, His-257 to Pro-268, Ser-274 to Gly-280, Pro-316 to Tyr-323, Ile-358 to Leu- |
| | 363, Gln-375 to Tyr-381, Gln-390 to Tyr-397, Gln-418 to Cys-430. |
| 835497 | Preferred epitopes include those comprising a sequence shown in SEQ ID NO. 718 as |
| | residues: Glu-141 to Pro-151, Asp-179 to Glu-184, Gly-214 to Ser-219, Thr-226 to |
| | Tyr-231, Thr-239 to Gly-248, Pro-281 to Gly-297, Pro-326 to Arg-336, Gln-408 to |
| | Asp-416. |
| 835978 | Preferred epitopes include those comprising a sequence shown in SEQ ID NO. 720 as |
| | residues: Trp-25 to Val-31. |
| 836274 | Preferred epitopes include those comprising a sequence shown in SEQ ID NO. 722 as |
| | residues: Ser-1 to Glu-9. |
| 836731 | Preferred epitopes include those comprising a sequence shown in SEQ ID NO. 723 as |
| | residues: Lys-15 to Glu-22, Gly-25 to Ala-34, Glu-75 to Gly-81, Gln-91 to Val-100, |
| | Pro-146 to Glu-155, Gln-161 to Phe-167, Asn-170 to Gly-178. |
| 838014 | Preferred epitopes include those comprising a sequence shown in SEQ ID NO. 724 as |
| | residues: Arg-1 to Pro-10, Asp-170 to Pro-176, Arg-203 to Tyr-212, Gly-228 to Lys- |
| | 235. |
| 838874 | Preferred epitopes include those comprising a sequence shown in SEQ ID NO. 725 as |
| | residues: Gln-30 to Gln-45. |
| 839120 | Preferred epitopes include those comprising a sequence shown in SEQ ID NO. 726 as |
| | residues: Thr-22 to Arg-27, Arg-69 to Gly-75, Leu-77 to Pro-85. |
| 839611 | Preferred epitopes include those comprising a sequence shown in SEQ ID NO. 727 as |
| | residues: Asp-12 to Thr-17. |
| 840138 | Preferred epitopes include those comprising a sequence shown in SEQ ID NO. 728 as |
| | residues: Ser-1 to Thr-10. |
| 840616 | Preferred epitopes include those comprising a sequence shown in SEQ ID NO. 729 as |
| | residues: Lys-93 to Gly-99, Glu-144 to Leu-160, Ser-265 to Asp-270, Thr-382 to Gln- |
| | 396, Val-512 to Val-517, Glu-519 to Asp-535. |
| 840780 | Preferred epitopes include those comprising a sequence shown in SEQ ID NO. 730 as |
| | residues: Leu-8 to Gly-14, Pro-151 to Glu-157. |
| 840857 | Preferred epitopes include those comprising a sequence shown in SEQ ID NO. 731 as |
| | residues: Gln-7 to Glu-22, Ala-27 to Arg-46, Ser-138 to Lys-147, Lys-158 to Pro-163, |
| | Asn-171 to Glu-187, Glu-202 to Val-208, Glu-234 to Gly-240, Ser-253 to Lys-260, |
| | Gln-272 to Pro-279, Arg-292 to Glu-307, Arg-310 to Arg-317, Asp-342 to Gly-351, |
| | Pro-367 to Gly-375, Pro-378 to Arg-388, Leu-425 to Ala-447, Arg-536 to Asp-544, |
| | Lys-551 to Lys-561, Val-599 to Asp-604, Ser-622 to Ala-630, Pro-653 to Phe-659, Thr- |
| | 666 to Ile-673, Pro-699 to Phe-705, Asn-709 to Gly-719, Ala-725 to Phe-737. |
| 840862 | Preferred epitopes include those comprising a sequence shown in SEQ ID NO. 732 as |
| | residues: Arg-2 to Pro-12, Lys-32 to Asn-37, His-75 to Asn-82. |
| 840864 | Preferred epitopes include those comprising a sequence shown in SEQ ID NO. 733 as |
| | residues: Pro-17 to Arg-30, Cys-34 to Gly-40, Met-74 to Glu-81, Pro-106 to Asp-111, |
| | Val-136 to Cys-147, Asn-192 to Asp-198. |
| 840938 | Preferred epitopes include those comprising a sequence shown in SEQ ID NO. 735 as |
| | residues: Ser-140 to Thr-148, Thr-194 to Lys-202. |
| 841884 | Preferred epitopes include those comprising a sequence shown in SEQ ID NO. 736 as |
| | residues: Thr-34 to Glu-47. |
| 842241 | Preferred epitopes include those comprising a sequence shown in SEQ ID NO. 737 as |
| | residues: Thr-92 to Lys-101, Glu-134 to Thr-142, Glu-149 to Lys-155, Trp-179 to Ser- |
| | 187, Thr-205 to Arg-211, Ser-218 to Tyr-225, Asp-283 to Gln-290, Glu-292 to Ile-302, |
| | Asn-304 to Met-315. |
| 843712 | Preferred epitopes include those comprising a sequence shown in SEQ ID NO. 738 as |
| | residues: Arg-10 to Asn-16, Ala-59 to Pro-67. |
| 844040 | Preferred epitopes include those comprising a sequence shown in SEQ ID NO. 739 as |
| | residues: Phe-59 to Glu-68, Lys-105 to Gly-111. |
| 844617 | Preferred epitopes include those comprising a sequence shown in SEQ ID NO. 742 as |
| | residues: Arg-1 to Lys-7. |
| 846187 | Preferred epitopes include those comprising a sequence shown in SEQ ID NO. 745 as |
| | residues: Gly-8 to Gly-14, Gly-41 to Glu-48, Glu-54 to Lys-74, Glu-87 to Arg-98, Thr- |
| | 158 to Asn-166, Gly-247 to Ser-254, Gly-257 to Arg-277, Ala-437 to Ser-444, Lys-505 |
| | to Arg-510, Phe-519 to Tyr-525, Lys-531 to Pro-538, Gly-562 to Leu-571, Phe-606 to |
| | Val-613, Val-692 to Ala-697, Ser-705 to Leu-715, Leu-742 to Cys-747. |
| HANGA53R | Preferred epitopes include those comprising a sequence shown in SEQ ID NO. 749 as |
| | residues: Arg-4 to Ser-9. |
| HAHCP93R | Preferred epitopes include those comprising a sequence shown in SEQ ID NO. 752 as |
| | residues: Ser-1 to Ser-12, Thr-23 to Arg-28. |
| HBGAA76R | Preferred epitopes include those comprising a sequence shown in SEQ ID NO. 753 as |
| | residues: Ser-4 to Ser-11, Pro-27 to Asn-37. |
| HTXPI29R | Preferred epitopes include those comprising a sequence shown in SEQ ID NO. 756 as |
| | residues: Thr-17 to Leu-24, Thr-57 to Tyr-67, Leu-92 to Phe-102, Asn-128 to Gln-134. |
| HBGAA54R | Preferred epitopes include those comprising a sequence shown in SEQ ID NO. 760 as |
| | residues: Arg-62 to Leu-70, Ile-74 to Arg-79. |
| HDPJR77R | Preferred epitopes include those comprising a sequence shown in SEQ ID NO. 763 as |
| | residues: Glu-7 to Lys-22, Thr-33 to Glu-39, Lys-69 to Glu-76, Asp-84 to Tyr-90. |
| HTTIO41R | Preferred epitopes include those comprising a sequence shown in SEQ ID NO. 764 as |
| | residues: Val-17 to Ser-22, Arg-41 to Glu-46, Lys-50 to Pro-75, Ser-92 to Pro-100. |
| HDPUL86R | Preferred epitopes include those comprising a sequence shown in SEQ ID NO. 767 as |
| | residues: Lys-7 to Gly-13. |
| HTXNT16R | Preferred epitopes include those comprising a sequence shown in SEQ ID NO. 768 as |
| | residues: Leu-67 to Asn-72, Thr-102 to Phe-111, Gly-127 to Gln-135. |
| HLXNA54R | Preferred epitopes include those comprising a sequence shown in SEQ ID NO. 770 as |
| | residues: Gln-1 to Glu-6, Pro-23 to Trp-31, Arg-46 to Trp-51. |
| H2LAX93R | Preferred epitopes include those comprising a sequence shown in SEQ ID NO. 772 as |
| | residues: Glu-3 to Gln-10. |
| HWAFW10R | Preferred epitopes include those comprising a sequence shown in SEQ ID NO. 773 as |
| | residues: Glu-13 to Asp-22, His-34 to Trp-40, Arg-69 to Lys-75. |
| HBGDD17R | Preferred epitopes include those comprising a sequence shown in SEQ ID NO. 775 as |
| | residues: Arg-23 to Thr-28, Pro-40 to Glu-51, Ala-62 to His-68. |
| H2CBB43R | Preferred epitopes include those comprising a sequence shown in SEQ ID NO. 778 as |
| | residues: Asp-90 to Asp-95, Arg-106 to Thr-117. |
| H2CBQ77R | Preferred epitopes include those comprising a sequence shown in SEQ ID NO. 779 as |
| | residues: Asp-11 to Gly-16, Gln-19 to Tyr-24, Pro-34 to Gly-46. |
| HOEMK06R | Preferred epitopes include those comprising a sequence shown in SEQ ID NO. 781 as |
| | residues: Pro-1 to Gln-14. |
| HCHAG30R | Preferred epitopes include those comprising a sequence shown in SEQ ID NO. 783 as |
| | residues: Gly-1 to Trp-7. |
| HAEAI26R | Preferred epitopes include those comprising a sequence shown in SEQ ID NO. 788 as |
| | residues: Lys-32 to Val-40, Arg-43 to Pro-51. |
| H2CBN76R | Preferred epitopes include those comprising a sequence shown in SEQ ID NO. 791 as |
| | residues: Ala-17 to Leu-22, Thr-72 to Lys-77. |
| HAGFX49R | Preferred epitopes include those comprising a sequence shown in SEQ ID NO. 792 as |
| | residues: Ala-10 to Leu-15, His-64 to Cys-71. |
| HTXKR32R | Preferred epitopes include those comprising a sequence shown in SEQ ID NO. 794 as |
| | residues: Ser-2 to Gly-12, Glu-57 to Val-65. |
| H6EAF46R | Preferred epitopes include those comprising a sequence shown in SEQ ID NO. 796 as |
| | residues: Arg-11 to Ser-21. |
| H2LAK40R | Preferred epitopes include those comprising a sequence shown in SEQ ID NO. 798 as |
| | residues: Glu-11 to Lys-20, Pro-22 to Arg-28. |
| H2LAY71R | Preferred epitopes include those comprising a sequence shown in SEQ ID NO. 799 as |
| | residues: Arg-26 to Leu-36, Gln-82 to Asp-101, Arg-103 to Arg-108, Arg-113 to Arg- |
| | 131. |
| HASAW80R | Preferred epitopes include those comprising a sequence shown in SEQ ID NO. 803 as |
| | residues: Gly-1 to Arg-6, Ala-19 to Pro-27, Gly-34 to Phe-40. |
| HCHAP25R | Preferred epitopes include those comprising a sequence shown in SEQ ID NO. 804 as |
| | residues: Ser-30 to Thr-40, Leu-78 to Val-85, Asp-92 to Ala-97. |
| HLTHH84R | Preferred epitopes include those comprising a sequence shown in SEQ ID NO. 805 as |
| | residues: Glu-2 to Ala-8. |
| HADDC09R | Preferred epitopes include those comprising a sequence shown in SEQ ID NO. 808 as |
| | residues: Leu-3 to Gly-9, Thr-20 to Gly-29. |
| HAQAI10R | Preferred epitopes include those comprising a sequence shown in SEQ ID NO. 811 as |
| | residues: Gly-1 to Lys-21. |
| HBGBT78R | Preferred epitopes include those comprising a sequence shown in SEQ ID NO. 814 as |
| | residues: Asn-1 to Lys-22. |
| HBGCB06R | Preferred epitopes include those comprising a sequence shown in SEQ ID NO. 815 as |
| | residues: Phe-1 to Phe-15. |
| HCHIMW05R | Preferred epitopes include those comprising a sequence shown in SEQ ID NO. 823 as |
| | residues: Pro-6 to Ser-11. |
| HODFW25R | Preferred epitopes include those comprising a sequence shown in SEQ ID NO. 829 as |
| | residues: Ser-1 to Thr-8, Glu-17 to Ala-32, Arg-39 to Trp-47. |
| HOEMQ91R | Preferred epitopes include those comprising a sequence shown in SEQ ID NO. 830 as |
| | residues: Arg-8 to Ser-13. |
| HOGBG56R | Preferred epitopes include those comprising a sequence shown in SEQ ID NO. 831 as |
| | residues: Lys-20 to Arg-25. |

[0116] The present invention encompasses polypeptides comprising, or alternatively consisting of, an epitope of the polypeptide sequence shown in SEQ ID NO:Y, or an epitope of the polypeptide sequence encoded by the cDNA in the related cDNA clone contained in a deposited library or encoded by a polynucleotide that hybridizes to the complement of an epitope encoding sequence of SEQ ID NO:X, or an epitope encoding sequence contained in the deposited cDNA clone under stringent hybridization conditions, or alternatively, under lower stringency hybridization conditions, as defined supra. The present invention further encompasses polynucleotide sequences encoding an epitope of a polypeptide sequence of the invention (such as, for example, the sequence disclosed in SEQ ID NO:X), polynucleotide sequences of the complementary strand of a polynucleotide sequence encoding an epitope of the invention, and polynucleotide sequences which hybridize to this complementary strand under stringent hybridization conditions or alternatively, under lower stringency hybridization conditions, as defined supra.

[0117] The term “epitopes,” as used herein, refers to portions of a polypeptide having antigenic or immunogenic activity in an animal, preferably a mammal, and most preferably in a human. In a preferred embodiment, the present invention encompasses a polypeptide comprising an epitope, as well as the polynucleotide encoding this polypeptide. An “immunogenic epitope,” as used herein, is defined as a portion of a protein that elicits an antibody response in an animal, as determined by any method known in the art, for example, by the methods for generating antibodies described infra. (See, for example, Geysen et al., Proc. Natl. Acad. Sci. USA 81:3998-4002 (1983)). The term “antigenic epitope,” as used herein, is defined as a portion of a protein to which an antibody can immunospecifically bind its antigen as determined by any method well known in the art, for example, by the immunoassays described herein. Immunospecific binding excludes non-specific binding but does not necessarily exclude cross-reactivity with other antigens. Antigenic epitopes need not necessarily be immunogenic.

[0118] Fragments which function as epitopes may be produced by any conventional means. (See, e.g., Houghten, R. A., Proc. Natl. Acad. Sci. USA 82:5131-5135 (1985) further described in U.S. Pat. No. 4,631,211.)

[0119] In the present invention, antigenic epitopes preferably contain a sequence of at least 4, at least 5, at least 6, at least 7, more preferably at least 8, at least 9, at least 10, at least 11, at least 12, at least 13, at least 14, at least 15, at least 20, at least 25, at least 30, at least 40, at least 50, and, most preferably, between about 15 to about 30 amino acids. Preferred polypeptides comprising immunogenic or antigenic epitopes are at least 10, 15, 20, 25, 30, 35, 40, 45, 50, 55, 60, 65, 70, 75, 80, 85, 90, 95, or 100 amino acid residues in length. Additional non-exclusive preferred antigenic epitopes include the antigenic epitopes disclosed herein, as well as portions thereof. Antigenic epitopes are useful, for example, to raise antibodies, including monoclonal antibodies, that specifically bind the epitope. Preferred antigenic epitopes include the antigenic epitopes disclosed herein, as well as any combination of two, three, four, five or more of these antigenic epitopes. Antigenic epitopes can be used as the target molecules in immunoassays. (See, for instance, Wilson et al., Cell 37:767-778 (1984); Sutcliffe et al., Science 219:660-666 (1983)).

[0120] Similarly, immunogenic epitopes can be used, for example, to induce antibodies according to methods well known in the art. (See, for instance, Sutcliffe et al., supra; Wilson et al., supra; Chow et al., Proc. Natl. Acad. Sci. USA 82:910-914; and Bittle et al., J. Gen. Virol. 66:2347-2354 (1985). Preferred immunogenic epitopes include the immunogenic epitopes disclosed herein, as well as any combination of two, three, four, five or more of these immunogenic epitopes. The polypeptides comprising one or more immunogenic epitopes may be presented for eliciting an antibody response together with a carrier protein, such as an albumin, to an animal system (such as rabbit or mouse), or, if the polypeptide is of sufficient length (at least about 25 amino acids), the polypeptide may be presented without a carrier. However, immunogenic epitopes comprising as few as 8 to 10 amino acids have been shown to be sufficient to raise antibodies capable of binding to, at the very least, linear epitopes in a denatured polypeptide (e.g., in Western blotting).

[0121] Epitope-bearing polypeptides of the present invention may be used to induce antibodies according to methods well known in the art including, but not limited to, in vivo immunization, in vitro immunization, and phage display methods. See, e.g., Sutcliffe et al., supra; Wilson et al., supra, and Bittle et al., J. Gen. Virol., 66:2347-2354 (1985). If in vivo immunization is used, animals may be immunized with free peptide; however, anti-peptide antibody titer may be boosted by coupling the peptide to a macromolecular carrier, such as keyhole limpet hemacyanin (KLH) or tetanus toxoid. For instance, peptides containing cysteine residues may be coupled to a carrier using a linker such as maleimidobenzoyl-N-hydroxysuccinimide ester (MBS), while other peptides may be coupled to carriers using a more general linking agent such as glutaraldehyde. Animals such as rabbits, rats and mice are immunized with either free or carrier-coupled peptides, for instance, by intraperitoneal and/or intradermal injection of emulsions containing about 100 μg of peptide or carrier protein and Freund's adjuvant or any other adjuvant known for stimulating an immune response. Several booster injections may be needed, for instance, at intervals of about two weeks, to provide a useful titer of anti-peptide antibody which can be detected, for example, by ELISA assay using free peptide adsorbed to a solid surface. The titer of anti-peptide antibodies in serum from an immunized animal may be increased by selection of anti-peptide antibodies, for instance, by adsorption to the peptide on a solid support and elution of the selected antibodies according to methods well known in the art.

[0122] As one of skill in the art will appreciate, and as discussed above, the polypeptides of the present invention, and immunogenic and/or antigenic epitope fragments thereof can be fused to other polypeptide sequences. For example, the polypeptides of the present invention may be fused with the constant domain of immunoglobulins (IgA, IgE, IgG, IgM), or portions thereof (CH1, CH2, CH3, or any combination thereof and portions thereof) resulting in chimeric polypeptides. Such fusion proteins may facilitate purification and may increase half-life in vivo. This has been shown for chimeric proteins consisting of the first two domains of the human CD4-polypeptide and various domains of the constant regions of the heavy or light chains of mammalian immunoglobulins. See, e.g., EP 394,827; Traunecker et al., Nature, 331:84-86 (1988). Enhanced delivery of an antigen across the epithelial barrier to the immune system has been demonstrated for antigens (e.g., insulin) conjugated to an FcRn binding partner such as IgG or Fc fragments (see, e.g., PCT Publications WO 96/22024 and WO 99/04813). IgG Fusion proteins that have a disulfide-linked dimeric structure due to the IgG portion desulfide bonds have also been found to be more efficient in binding and neutralizing other molecules than monomeric polypeptides or fragments thereof alone. See, e.g., Fountoulakis et al., J. Biochem., 270:3958-3964 (1995).

[0123] Similarly, EP-A-O 464 533 (Canadian counterpart 2045869) discloses fusion proteins comprising various portions of constant region of immunoglobulin molecules together with another human protein or part thereof. In many cases, the Fc part in a fusion protein is beneficial in therapy and diagnosis, and thus can result in, for example, improved pharmacokinetic properties. (EP-A 0232 262.) Alternatively, deleting the Fc part after the fusion protein has been expressed, detected, and purified, may be desired. For example, the Fc portion may hinder therapy and diagnosis if the fusion protein is used as an antigen for immunizations. In drug discovery, for example, human proteins, such as hIL-5, have been fused with Fc portions for the purpose of high-throughput screening assays to identify antagonists of hIL-5. (See, D. Bennett et al., J. Molecular Recognition 8:52-58 (1995); K. Johanson et al., J. Biol. Chem. 270:9459-9471 (1995).)

[0124] Moreover, the polypeptides of the present invention can be fused to marker sequences, such as a peptide which facilitates purification of the fused polypeptide. In preferred embodiments, the marker amino acid sequence is a hexa-histidine peptide, such as the tag provided in a pQE vector (QIAGEN, Inc., 9259 Eton Avenue, Chatsworth, Calif., 91311), among others, many of which are commercially available. As described in Gentz et al., Proc. Natl. Acad. Sci. USA 86:821-824 (1989), for instance, hexa-histidine provides for convenient purification of the fusion protein. Another peptide tag useful for purification, the “HA” tag, corresponds to an epitope derived from the influenza hemagglutinin protein. (Wilson et al., Cell 37:767 (1984).)

[0125] Thus, any of these above fusions can be engineered using the polynucleotides or the polypeptides of the present invention.

[0126] Nucleic acids encoding the above epitopes can also be recombined with a gene of interest as an epitope tag (e.g., the hemagglutinin (“HA”) tag or flag tag) to aid in detection and purification of the expressed polypeptide. For example, a system described by Janknecht et al. allows for the ready purification of non-denatured fusion proteins expressed in human cell lines (Janknecht et al., Proc. Natl. Acad. Sci. USA 88:8972-897 (1991)). In this system, the gene of interest is subcloned into a vaccinia recombination plasmid such that the open reading frame of the gene is translationally fused to an amino-terminal tag consisting of six histidine residues. The tag serves as a matrix binding domain for the fusion protein. Extracts from cells infected with the recombinant vaccinia virus are loaded onto Ni2+ nitriloacetic acid-agarose column and histidine-tagged proteins can be selectively eluted with imidazole-containing buffers.

[0127] Additional fusion proteins of the invention may be generated through the techniques of gene-shuffling, motif-shuffling, exon-shuffling, and/or codon-shuffling (collectively referred to as “DNA shuffling”). DNA shuffling may be employed to modulate the activities of polypeptides of the invention, such methods can be used to generate polypeptides with altered activity, as well as agonists and antagonists of the polypeptides. See, generally, U.S. Pat. Nos. 5,605,793; 5,811,238; 5,830,721; 5,834,252; and 5,837,458, and Patten et al., Curr. Opinion Biotechnol. 8:724-33 (1997); Harayama, Trends Biotechnol. 16(2):76-82 (1998); Hansson, et al., J. Mol. Biol. 287:265-76 (1999); and Lorenzo and Blasco, Biotechniques 24(2):308-13 (1998) (each of these patents and publications are hereby incorporated by reference in its entirety). In one embodiment, alteration of polynucleotides corresponding to SEQ ID NO:X and the polypeptides encoded by these polynucleotides may be achieved by DNA shuffling. DNA shuffling involves the assembly of two or more DNA segments by homologous or site-specific recombination to generate variation in the polynucleotide sequence. In another embodiment, polynucleotides of the invention, or the encoded polypeptides, may be altered by being subjected to random mutagenesis by error-prone PCR, random nucleotide insertion or other methods prior to recombination. In another embodiment, one or more components, motifs, sections, parts, domains, fragments, etc., of a polynucleotide encoding a polypeptide of the invention may be recombined with one or more components, motifs, sections, parts, domains, fragments, etc. of one or more heterologous molecules.

[0128] As discussed herein, any polypeptide of the present invention can be used to generate fusion proteins. For example, the polypeptide of the present invention, when fused to a second protein, can be used as an antigenic tag. Antibodies raised against the polypeptide of the present invention can be used to indirectly detect the second protein by binding to the polypeptide. Moreover, because secreted proteins target cellular locations based on trafficking signals, polypeptides of the present invention which are shown to be secreted can be used as targeting molecules once fused to other proteins.

[0129] Examples of domains that can be fused to polypeptides of the present invention include not only heterologous signal sequences, but also other heterologous functional regions. The fusion does not necessarily need to be direct, but may occur through linker sequences.

[0130] In certain preferred embodiments, proteins of the invention comprise fusion proteins wherein the polypeptides are N and/or C-terminal deletion mutants. In preferred embodiments, the application is directed to nucleic acid molecules at least 80%, 85%, 90%, 95%, 96%, 97%, 98% or 99% identical to the nucleic acid sequences encoding polypeptides having the amino acid sequence of the specific N- and C-terminal deletions mutants. Polynucleotides encoding these polypeptides are also encompassed by the invention.

[0131] Moreover, fusion proteins may also be engineered to improve characteristics of the polypeptide of the present invention. For instance, a region of additional amino acids, particularly charged amino acids, may be added to the N-terminus of the polypeptide to improve stability and persistence during purification from the host cell or subsequent handling and storage. Also, peptide moieties may be added to the polypeptide to facilitate purification. Such regions may be removed prior to final preparation of the polypeptide. The addition of peptide moieties to facilitate handling of polypeptides are familiar and routine techniques in the art.

[0132] Vectors, Host Cells, and Protein Production

[0133] The present invention also relates to vectors containing the polynucleotide of the present invention, host cells, and the production of polypeptides by recombinant techniques. The vector may be, for example, a phage, plasmid, viral, or retroviral vector. Retroviral vectors may be replication competent or replication defective. In the latter case, viral propagation generally will occur only in complementing host cells.

[0134] The polynucleotides of the invention may be joined to a vector containing a selectable marker for propagation in a host. Generally, a plasmid vector is introduced in a precipitate, such as a calcium phosphate precipitate, or in a complex with a charged lipid. If the vector is a virus, it may be packaged in vitro using an appropriate packaging cell line and then transduced into host cells.

[0135] The polynucleotide insert should be operatively linked to an appropriate promoter, such as the phage lambda PL promoter, the E. coli lac, trp, phoA and tac promoters, the SV40 early and late promoters and promoters of retroviral LTRs, to name a few. Other suitable promoters will be known to the skilled artisan. The expression constructs will further contain sites for transcription initiation, termination, and, in the transcribed region, a ribosome binding site for translation. The coding portion of the transcripts expressed by the constructs will preferably include a translation initiating codon at the beginning and a termination codon (UAA, UGA or UAG) appropriately positioned at the end of the polypeptide to be translated.

[0136] As indicated, the expression vectors will preferably include at least one selectable marker. Such markers include dihydrofolate reductase, G418 or neomycin resistance for eukaryotic cell culture and tetracycline, kanamycin or ampicillin resistance genes for culturing in E. coli and other bacteria. Representative examples of appropriate hosts include, but are not limited to, bacterial cells, such as E. coli, Streptomyces and Salmonella typhimurium cells; fungal cells, such as yeast cells (e.g., Saccharomyces cerevisiae or Pichia pastoris (ATCC Accession No. 201178)); insect cells such as Drosophila S2 and Spodoptera Sf9 cells; animal cells such as CHO, COS, 293, and Bowes melanoma cells; and plant cells. Appropriate culture mediums and conditions for the above-described host cells are known in the art.

[0137] Among vectors preferred for use in bacteria include pQE70, pQE60 and pQE-9, available from QIAGEN, Inc.; pBluescript vectors, Phagescript vectors, pNH8A, pNH16a, pNH18A, pNH46A, available from Stratagene Cloning Systems, Inc.; and ptrc99a, pKK223-3, pKK233-3, pDR540, pRIT5 available from Pharmacia Biotech, Inc. Among preferred eukaryotic vectors are pWLNEO, pSV2CAT, pOG44, pXT1 and pSG available from Stratagene; and pSVK3, pBPV, pMSG and pSVL available from Pharmacia. Preferred expression vectors for use in yeast systems include, but are not limited to pYES2, pYD1, pTEF1/Zeo, pYES2/GS, pPICZ, pGAPZ, pGAPZalph, pPIC9, pPIC3.5, pHIL-D2, pHIL-S1, pPIC3.5K, pPIC9K, and PA0815 (all available from Invitrogen, Carlbad, Calif.). Other suitable vectors will be readily apparent to the skilled artisan.

[0138] Introduction of the construct into the host cell can be effected by calcium phosphate transfection, DEAE-dextran mediated transfection, cationic lipid-mediated transfection, electroporation, transduction, infection, or other methods. Such methods are described in many standard laboratory manuals, such as Davis et al., Basic Methods In Molecular Biology (1986). It is specifically contemplated that the polypeptides of the present invention may in fact be expressed by a host cell lacking a recombinant vector.

[0139] A polypeptide of this invention can be recovered and purified from recombinant cell cultures by well-known methods including ammonium sulfate or ethanol precipitation, acid extraction, anion or cation exchange chromatography, phosphocellulose chromatography, hydrophobic interaction chromatography, affinity chromatography, hydroxylapatite chromatography and lectin chromatography. Most preferably, high performance liquid chromatography (“HPLC”) is employed for purification.

[0140] Polypeptides of the present invention can also be recovered from: products purified from natural sources, including bodily fluids, tissues and cells, whether directly isolated or cultured; products of chemical synthetic procedures; and products produced by recombinant techniques from a prokaryotic or eukaryotic host, including, for example, bacterial, yeast, higher plant, insect, and mammalian cells. Depending upon the host employed in a recombinant production procedure, the polypeptides of the present invention may be glycosylated or may be non-glycosylated. In addition, polypeptides of the invention may also include an initial modified methionine residue, in some cases as a result of host-mediated processes. Thus, it is well known in the art that the N-terminal methionine encoded by the translation initiation codon generally is removed with high efficiency from any protein after translation in all eukaryotic cells. While the N-terminal methionine on most proteins also is efficiently removed in most prokaryotes, for some proteins, this prokaryotic removal process is inefficient, depending on the nature of the amino acid to which the N-terminal methionine is covalently linked.

[0141] In one embodiment, the yeast Pichia pastoris is used to express polypeptides of the invention in a eukaryotic system. Pichia pastoris is a methylotrophic yeast which can metabolize methanol as its sole carbon source. A main step in the methanol metabolization pathway is the oxidation of methanol to formaldehyde using 02-This reaction is catalyzed by the enzyme alcohol oxidase. In order to metabolize methanol as its sole carbon source, Pichia pastoris must generate high levels of alcohol oxidase due, in part, to the relatively low affinity of alcohol oxidase for O₂. Consequently, in a growth medium depending on methanol as a main carbon source, the promoter region of one of the two alcohol oxidase genes (AOX1) is highly active. In the presence of methanol, alcohol oxidase produced from the AOX1 gene comprises up to approximately 30% of the total soluble protein in Pichia pastoris. See, Ellis, S. B., et al., Mol. Cell. Biol. 5:1111-21 (1985); Koutz, P. J, et al., Yeast 5:167-77 (1989); Tschopp, J. F., et al., Nucl. Acids Res. 15:3859-76 (1987). Thus, a heterologous coding sequence, such as, for example, a polynucleotide of the present invention, under the transcriptional regulation of all or part of the AOX1 regulatory sequence is expressed at exceptionally high levels in Pichia yeast grown in the presence of methanol.

[0142] In one example, the plasmid vector pPIC9K is used to express DNA encoding a polypeptide of the invention, as set forth herein, in a Pichea yeast system essentially as described in “Pichia Protocols: Methods in Molecular Biology,” D. R. Higgins and J. Cregg, eds. The Humana Press, Totowa, N.J., 1998. This expression vector allows expression and secretion of a polypeptide of the invention by virtue of the strong AOX1 promoter linked to the Pichia pastotis alkaline phosphatase (PHO) secretory signal peptide (i.e., leader) located upstream of a multiple cloning site.

[0143] Many other yeast vectors could be used in place of pPIC9K, such as, pYES2, pYD1, pTEF1/Zeo, pYES2/GS, pPICZ, pGAPZ, pGAPZalpha, pPIC9, pPIC3.5, pHIL-D2, pHIL-S1, pPIC3.5K, and PAO815, as one skilled in the art would readily appreciate, as long as the proposed expression construct provides appropriately located signals for transcription, translation, secretion (if desired), and the like, including an in-frame AUG as required.

[0144] In another embodiment, high-level expression of a heterologous coding sequence, such as, for example, a polynucleotide of the present invention, may be achieved by cloning the heterologous polynucleotide of the invention into an expression vector such as, for example, pGAPZ or pGAPZalpha, and growing the yeast culture in the absence of methanol.

[0145] In addition to encompassing host cells containing the vector constructs discussed herein, the invention also encompasses primary, secondary, and immortalized host cells of vertebrate origin, particularly mammalian origin, that have been engineered to delete or replace endogenous genetic material (e.g., coding sequence), and/or to include genetic material (e.g., heterologous polynucleotide sequences) that is operably associated with polynucleotides of the invention, and which activates, alters, and/or amplifies endogenous polynucleotides. For example, techniques known in the art may be used to operably associate heterologous control regions (e.g., promoter and/or enhancer) and endogenous polynucleotide sequences via homologous recombination (see, e.g., U.S. Pat. No. 5,641,670, issued Jun. 24, 1997; International Publication No. WO 96/29411, published Sep. 26, 1996; International Publication No. WO 94/12650, published Aug. 4, 1994; Koller et al., Proc. Natl. Acad. Sci. USA 86:8932-8935 (1989); and Zijlstra et al., Nature 342:435-438 (1989), the disclosures of each of which are incorporated by reference in their entireties).

[0146] In addition, polypeptides of the invention can be chemically synthesized using techniques known in the art (e.g., see Creighton, 1983, Proteins: Structures and Molecular Principles, W.H. Freeman & Co., N.Y., and Hunkapiller et al., Nature, 310:105-111 (1984)). For example, a polypeptide corresponding to a fragment of a polypeptide can be synthesized by use of a peptide synthesizer. Furthermore, if desired, nonclassical amino acids or chemical amino acid analogs can be introduced as a substitution or addition into the polypeptide sequence. Non-classical amino acids include, but are not limited to, to the D-isomers of the common amino acids, 2,4-diaminobutyric acid, a-amino isobutyric acid, 4-aminobutyric acid, Abu, 2-amino butyric acid, g-Abu, e-Ahx, 6-amino hexanoic acid, Aib, 2-amino isobutyric acid, 3-amino propionic acid, ornithine, norleucine, norvaline, hydroxyproline, sarcosine, citrulline, homocitrulline, cysteic acid, t-butylglycine, t-butylalanine, phenylglycine, cyclohexylalanine, b-alanine, fluoro-amino acids, designer amino acids such as b-methyl amino acids, Ca-methyl amino acids, Na-methyl amino acids, and amino acid analogs in general. Furthermore, the amino acid can be D (dextrorotary) or L (levorotary).

[0147] Non-naturally occurring variants may be produced using art-known mutagenesis techniques, which include, but are not limited to oligonucleotide mediated mutagenesis, alanine scanning, PCR mutagenesis, site directed mutagenesis (see, e.g., Carter et al., Nucl. Acids Res. 13:4331 (1986); and Zoller et al., Nucl. Acids Res. 10:6487 (1982)), cassette mutagenesis (see, e.g., Wells et al., Gene 34:315 (1985)), restriction selection mutagenesis (see, e.g., Wells et al., Philos. Trans. R. Soc. London SerA 317:415 (1986)).

[0148] The invention additionally, encompasses polypeptides of the present invention which are differentially modified during or after translation, e.g., by glycosylation, acetylation, phosphorylation, amidation, derivatization by known protecting/blocking groups, proteolytic cleavage, linkage to an antibody molecule or other cellular ligand, etc. Any of numerous chemical modifications may be carried out by known techniques, including but not limited, to specific chemical cleavage by cyanogen bromide, trypsin, chymotrypsin, papain, V8 protease, NaBH4; acetylation, formylation, oxidation, reduction; metabolic synthesis in the presence of tunicamycin; etc.

[0149] Additional post-translational modifications encompassed by the invention include, for example, e.g., N-linked or O-linked carbohydrate chains, processing of N-terminal or C-terminal ends), attachment of chemical moieties to the amino acid backbone, chemical modifications of N-linked or O-linked carbohydrate chains, and addition or deletion of an N-terminal methionine residue as a result of procaryotic host cell expression. The polypeptides may also be modified with a detectable label, such as an enzymatic, fluorescent, isotopic or affinity label to allow for detection and isolation of the protein.

[0150] Also provided by the invention are chemically modified derivatives of the polypeptides of the invention which may provide additional advantages such as increased solubility, stability and circulating time of the polypeptide, or decreased immunogenicity (see U.S. Pat. No. 4,179,337). The chemical moieties for derivitization may be selected from water soluble polymers such as polyethylene glycol, ethylene glycol/propylene glycol copolymers, carboxymethylcellulose, dextran, polyvinyl alcohol and the like. The polypeptides may be modified at random positions within the molecule, or at predetermined positions within the molecule and may include one, two, three or more attached chemical moieties.

[0151] The polymer may be of any molecular weight, and may be branched or unbranched. For polyethylene glycol, the preferred molecular weight is between about 1 kDa and about 100 kDa (the term “about” indicating that in preparations of polyethylene glycol, some molecules will weigh more, some less, than the stated molecular weight) for ease in handling and manufacturing. Other sizes may be used, depending on the desired therapeutic profile (e.g., the duration of sustained release desired, the effects, if any on biological activity, the ease in handling, the degree or lack of antigenicity and other known effects of the polyethylene glycol to a therapeutic protein or analog). For example, the polyethylene glycol may have an average molecular weight of about 200; 500; 1000; 1500; 2000; 2500; 3000; 3500; 4000; 4500; 5000; 5500; 6000; 6500; 7000; 7500; 8000; 8500; 9000; 9500; 10,000; 10,500; 11,000; 11,500; 12,000; 12,500; 13,000; 13,500; 14,000; 14,500; 15,000; 15,500; 16,000; 16,500; 17,000; 17,500; 18,000; 18,500; 19,000; 19,500; 20,000; 25,000; 30,000; 35,000; 40,000; 50,000; 55,000; 60,000; 65,000; 70,000; 75,000; 80,000; 85,000; 90,000; 95,000; or 100,000 kDa.

[0152] As noted above, the polyethylene glycol may have a branched structure. Branched polyethylene glycols are described, for example, in U.S. Pat. No. 5,643,575; Morpurgo et al., Appl. Biochem. Biotechnol. 56:59-72 (1996); Vorobjev et al., Nucleosides Nucleotides 18:2745-2750 (1999); and Caliceti et al., Bioconjug. Chem. 10:638-646 (1999), the disclosures of each of which are incorporated herein by reference.

[0153] The polyethylene glycol molecules (or other chemical moieties) should be attached to the protein with consideration of effects on functional or antigenic domains of the protein. There are a number of attachment methods available to those skilled in the art, e.g., EP 0 401 384, herein incorporated by reference (coupling PEG to G-CSF), see also Malik et al., Exp. Hematol. 20:1028-1035 (1992) (reporting pegylation of GM-CSF using tresyl chloride). For example, polyethylene glycol may be covalently bound through amino acid residues via a reactive group, such as, a free amino or carboxyl group. Reactive groups are those to which an activated polyethylene glycol molecule may be bound. The amino acid residues having a free amino group may include lysine residues and the N-terminal amino acid residues; those having a free carboxyl group may include aspartic acid residues glutamic acid residues and the C-terminal amino acid residue. Sulfhydryl groups may also be used as a reactive group for attaching the polyethylene glycol molecules. Preferred for therapeutic purposes is attachment at an amino group, such as attachment at the N-terminus or lysine group.

[0154] As suggested above, polyethylene glycol may be attached to proteins via linkage to any of a number of amino acid residues. For example, polyethylene glycol can be linked to a proteins via covalent bonds to lysine, histidine, aspartic acid, glutamic acid, or cysteine residues. One or more reaction chemistries may be employed to attach polyethylene glycol to specific amino acid residues (e.g., lysine, histidine, aspartic acid, glutamic acid, or cysteine) of the protein or to more than one type of amino acid residue (e.g., lysine, histidine, aspartic acid, glutamic acid, cysteine and combinations thereof) of the protein.

[0155] One may specifically desire proteins chemically modified at the N-terminus. Using polyethylene glycol as an illustration of the present composition, one may select from a variety of polyethylene glycol molecules (by molecular weight, branching, etc.), the proportion of polyethylene glycol molecules to protein (polypeptide) molecules in the reaction mix, the type of pegylation reaction to be performed, and the method of obtaining the selected N-terminally pegylated protein. The method of obtaining the N-terminally pegylated preparation (i.e., separating this moiety from other monopegylated moieties if necessary) may be by purification of the N-terminally pegylated material from a population of pegylated protein molecules. Selective proteins chemically modified at the N-terminus modification may be accomplished by reductive alkylation which exploits differential reactivity of different types of primary amino groups (lysine versus the N-terminal) available for derivatization in a particular protein. Under the appropriate reaction conditions, substantially selective derivatization of the protein at the N-terminus with a carbonyl group containing polymer is achieved.

[0156] As indicated above, pegylation of the proteins of the invention may be accomplished by any number of means. For example, polyethylene glycol may be attached to the protein either directly or by an intervening linker. Linkerless systems for attaching polyethylene glycol to proteins are described in Delgado et al., Crit. Rev. Thera. Drug Carrier Sys. 9:249-304 (1992); Francis et al., Intern. J. of Hematol. 68:1-18 (1998); U.S. Pat. No. 4,002,531; U.S. Pat. No. 5,349,052; WO 95/06058; and WO 98/32466, the disclosures of each of which are incorporated herein by reference.

[0157] One system for attaching polyethylene glycol directly to amino acid residues of proteins without an intervening linker employs tresylated MPEG, which is produced by the modification of monmethoxy polyethylene glycol (MPEG) using tresylchloride (ClSO₂CH₂CF₃). Upon reaction of protein with tresylated MPEG, polyethylene glycol is directly attached to amine groups of the protein. Thus, the invention includes protein-polyethylene glycol conjugates produced by reacting proteins of the invention with a polyethylene glycol molecule having a 2,2,2-trifluoreothane sulphonyl group.

[0158] Polyethylene glycol can also be attached to proteins using a number of different intervening linkers. For example, U.S. Pat. No. 5,612,460, the entire disclosure of which is incorporated herein by reference, discloses urethane linkers for connecting polyethylene glycol to proteins. Protein-polyethylene glycol conjugates wherein the polyethylene glycol is attached to the protein by a linker can also be produced by reaction of proteins with compounds such as MPEG-succinimidylsuccinate, MPEG activated with 1,1′-carbonyldiimidazole, MPEG-2,4,5-trichloropenylcarbonate, MPEG-p-nitrophenolcarbonate, and various MPEG-succinate derivatives. A number additional polyethylene glycol derivatives and reaction chemistries for attaching polyethylene glycol to proteins are described in WO 98/32466, the entire disclosure of which is incorporated herein by reference. Pegylated protein products produced using the reaction chemistries set out herein are included within the scope of the invention.

[0159] The number of polyethylene glycol moieties attached to each protein of the invention (i.e., the degree of substitution) may also vary. For example, the pegylated proteins of the invention may be linked, on average, to 1, 2, 3, 4, 5, 6, 7, 8, 9, 10, 12, 15, 17, 20, or more polyethylene glycol molecules. Similarly, the average degree of substitution within ranges such as 1-3, 2-4, 3-5, 4-6, 5-7, 6-8, 7-9, 8-10, 9-11, 10-12, 11-13, 12-14, 13-15, 14-16, 15-17, 16-18, 17-19, or 18-20 polyethylene glycol moieties per protein molecule. Methods for determining the degree of substitution are discussed, for example, in Delgado et al., Crit. Rev. Thera. Drug Carrier Sys. 9:249-304 (1992).

[0160] The ovarian and/or breast antigen polypeptides of the invention may be in monomers or multimers (i.e., dimers, trimers, tetramers and higher multimers). Accordingly, the present invention relates to monomers and multimers of the polypeptides of the invention, their preparation, and compositions (preferably, Therapeutics) containing them. In specific embodiments, the polypeptides of the invention are monomers, dimers, trimers or tetramers. In additional embodiments, the multimers of the invention are at least dimers, at least trimers, or at least tetramers.

[0161] Multimers encompassed by the invention may be homomers or heteromers. As used herein, the term homomer, refers to a multimer containing only polypeptides corresponding to the amino acid sequence of SEQ ID NO:Y or an amino acid sequence encoded by SEQ ID NO:X, and/or an amino acid sequence encoded by the cDNA in a related cDNA clone contained in a deposited library (including fragments, variants, splice variants, and fusion proteins, corresponding to any one of these as described herein). These homomers may contain polypeptides having identical or different amino acid sequences. In a specific embodiment, a homomer of the invention is a multimer containing only polypeptides having an identical amino acid sequence. In another specific embodiment, a homomer of the invention is a multimer containing polypeptides having different amino acid sequences. In specific embodiments, the multimer of the invention is a homodimer (e.g., containing polypeptides having identical or different amino acid sequences) or a homotrimer (e.g., containing polypeptides having identical and/or different amino acid sequences). In additional embodiments, the homomeric multimer of the invention is at least a homodimer, at least a homotrimer, or at least a homotetramer.

[0162] As used herein, the term heteromer refers to a multimer containing one or more heterologous polypeptides (i.e., polypeptides of different proteins) in addition to the polypeptides of the invention. In a specific embodiment, the multimer of the invention is a heterodimer, a heterotrimer, or a heterotetramer. In additional embodiments, the heteromeric multimer of the invention is at least a heterodimer, at least a heterotrimer, or at least a heterotetramer.

[0163] Multimers of the invention may be the result of hydrophobic, hydrophilic, ionic and/or covalent associations and/or may be indirectly linked, by for example, liposome formation. Thus, in one embodiment, multimers of the invention, such as, for example, homodimers or homotrimers, are formed when polypeptides of the invention contact one another in solution. In another embodiment, heteromultimers of the invention, such as, for example, heterotrimers or heterotetramers, are formed when polypeptides of the invention contact antibodies to the polypeptides of the invention (including antibodies to the heterologous polypeptide sequence in a fusion protein of the invention) in solution. In other embodiments, multimers of the invention are formed by covalent associations with and/or between the polypeptides of the invention. Such covalent associations may involve one or more amino acid residues contained in the polypeptide sequence (e.g., that recited in SEQ ID NO:Y, or contained in a polypeptide encoded by SEQ ID NO:X, and/or by the cDNA in the related cDNA clone contained in a deposited library). In one instance, the covalent associations are cross-linking between cysteine residues located within the polypeptide sequences which interact in the native (i.e., naturally occurring) polypeptide. In another instance, the covalent associations are the consequence of chemical or recombinant manipulation. Alternatively, such covalent associations may involve one or more amino acid residues contained in the heterologous polypeptide sequence in a fusion protein. In one example, covalent associations are between the heterologous sequence contained in a fusion protein of the invention (see, e.g., U.S. Pat. No. 5,478,925). In a specific example, the covalent associations are between the heterologous sequence contained in a Fc fusion protein of the invention (as described herein). In another specific example, covalent associations of fusion proteins of the invention are between heterologous polypeptide sequence from another protein that is capable of forming covalently associated multimers, such as for example, oseteoprotegerin (see, e.g., International Publication NO: WO 98/49305, the contents of which are herein incorporated by reference in its entirety). In another embodiment, two or more polypeptides of the invention are joined through peptide linkers. Examples include those peptide linkers described in U.S. Pat. No. 5,073,627 (hereby incorporated by reference). Proteins comprising multiple polypeptides of the invention separated by peptide linkers may be produced using conventional recombinant DNA technology.

[0164] Another method for preparing multimer polypeptides of the invention involves use of polypeptides of the invention fused to a leucine zipper or isoleucine zipper polypeptide sequence. Leucine zipper and isoleucine zipper domains are polypeptides that promote multimerization of the proteins in which they are found. Leucine zippers were originally identified in several DNA-binding proteins (Landschulz et al., Science 240:1759, (1988)), and have since been found in a variety of different proteins. Among the known leucine zippers are naturally occurring peptides and derivatives thereof that dimerize or trimerize. Examples of leucine zipper domains suitable for producing soluble multimeric proteins of the invention are those described in PCT application WO 94/10308, hereby incorporated by reference. Recombinant fusion proteins comprising a polypeptide of the invention fused to a polypeptide sequence that dimerizes or trimerizes in solution are expressed in suitable host cells, and the resulting soluble multimeric fusion protein is recovered from the culture supernatant using techniques known in the art.

[0165] Trimeric polypeptides of the invention may offer the advantage of enhanced biological activity. Preferred leucine zipper moieties and isoleucine moieties are those that preferentially form trimers. One example is a leucine zipper derived from lung surfactant protein D (SPD), as described in Hoppe et al. (FEBS Letters 344:191, (1994)) and in U.S. patent application Ser. No. 08/446,922, hereby incorporated by reference. Other peptides derived from naturally occurring trimeric proteins may be employed in preparing trimeric polypeptides of the invention.

[0166] In another example, proteins of the invention are associated by interactions between Flag® polypeptide sequence contained in fusion proteins of the invention containing Flag® polypeptide seuqence. In a further embodiment, associations proteins of the invention are associated by interactions between heterologous polypeptide sequence contained in Flag® fusion proteins of the invention and anti-Flag(® antibody.

[0167] The multimers of the invention may be generated using chemical techniques known in the art. For example, polypeptides desired to be contained in the multimers of the invention may be chemically cross-linked using linker molecules and linker molecule length optimization techniques known in the art (see, e.g., U.S. Pat. No. 5,478,925, which is herein incorporated by reference in its entirety). Additionally, multimers of the invention may be generated using techniques known in the art to form one or more inter-molecule cross-links between the cysteine residues located within the sequence of the polypeptides desired to be contained in the multimer (see, e.g., U.S. Pat. No. 5,478,925, which is herein incorporated by reference in its entirety). Further, polypeptides of the invention may be routinely modified by the addition of cysteine or biotin to the C-terminus or N-terminus of the polypeptide and techniques known in the art may be applied to generate multimers containing one or more of these modified polypeptides (see, e.g., U.S. Pat. No. 5,478,925, which is herein incorporated by reference in its entirety). Additionally, techniques known in the art may be applied to generate liposomes containing the polypeptide components desired to be contained in the multimer of the invention (see, e.g., U.S. Pat. No. 5,478,925, which is herein incorporated by reference in its entirety).

[0168] Alternatively, multimers of the invention may be generated using genetic engineering techniques known in the art. In one embodiment, polypeptides contained in multimers of the invention are produced recombinantly using fusion protein technology described herein or otherwise known in the art (see, e.g., U.S. Pat. No. 5,478,925, which is herein incorporated by reference in its entirety). In a specific embodiment, polynucleotides coding for a homodimer of the invention are generated by ligating a polynucleotide sequence encoding a polypeptide of the invention to a sequence encoding a linker polypeptide and then further to a synthetic polynucleotide encoding the translated product of the polypeptide in the reverse orientation from the original C-terminus to the N-terminus (lacking the leader sequence) (see, e.g., U.S. Pat. No. 5,478,925, which is herein incorporated by reference in its entirety). In another embodiment, recombinant techniques described herein or otherwise known in the art are applied to generate recombinant polypeptides of the invention which contain a transmembrane domain (or hyrophobic or signal peptide) and which can be incorporated by membrane reconstitution techniques into liposomes (see, e.g., U.S. Pat. No. 5,478,925, which is herein incorporated by reference in its entirety).

[0169] Antibodies

[0170] Further polypeptides of the invention relate to antibodies and T-cell antigen receptors (TCR) which immunospecifically bind a polypeptide, polypeptide fragment, or variant of SEQ ID NO:Y, and/or an epitope, of the present invention (as determined by immunoassays well known in the art for assaying specific antibody-antigen binding). Antibodies of the invention include, but are not limited to, polyclonal, monoclonal, multispecific, human, humanized or chimeric antibodies, single chain antibodies, Fab fragments, F(ab′) fragments, fragments produced by a Fab expression library, anti-idiotypic (anti-Id) antibodies (including, e.g., anti-Id antibodies to antibodies of the invention), and epitope-binding fragments of any of the above. The term “antibody,” as used herein, refers to immunoglobulin molecules and immunologically active portions of immunoglobulin molecules, i.e., molecules that contain an antigen binding site that immunospecifically binds an antigen. The immunoglobulin molecules of the invention can be of any type (e.g., IgG, IgE, IgM, IgD, IgA and IgY), class (e.g., IgG1, IgG2, IgG3, IgG4, IgA1 and IgA2) or subclass of immunoglobulin molecule.

[0171] Most preferably the antibodies are human antigen-binding antibody fragments of the present invention and include, but are not limited to, Fab, Fab′ and F(ab′)2, Fd, single-chain Fvs (scFv), single-chain antibodies, disulfide-linked Fvs (sdFv) and fragments comprising either a VL or VH domain. Antigen-binding antibody fragments, including single-chain antibodies, may comprise the variable region(s) alone or in combination with the entirety or a portion of the following: hinge region, CH1, CH2, and CH3 domains. Also included in the invention are antigen-binding fragments also comprising any combination of variable region(s) with a hinge region, CH1, CH2, and CH3 domains. The antibodies of the invention may be from any animal origin including birds and mammals. Preferably, the antibodies are human, murine (e.g., mouse and rat), donkey, ship rabbit, goat, guinea pig, camel, horse, or chicken. As used herein, “human” antibodies include antibodies having the amino acid sequence of a human immunoglobulin and include antibodies isolated from human immunoglobulin libraries or from animals transgenic for one or more human immunoglobulin and that do not express endogenous immunoglobulins, as described infra and, for example in, U.S. Pat. No. 5,939,598 by Kucherlapati et al.

[0172] The antibodies of the present invention may be monospecific, bispecific, trispecific or of greater multispecificity. Multispecific antibodies may be specific for different epitopes of a polypeptide of the present invention or may be specific for both a polypeptide of the present invention as well as for a heterologous epitope, such as a heterologous polypeptide or solid support material. See, e.g., PCT publications WO 93/17715; WO 92/08802; WO 91/00360; WO 92/05793; Tutt, et al., J. Immunol. 147:60-69 (1991); U.S. Pat. Nos. 4,474,893; 4,714,681; 4,925,648; 5,573,920; 5,601,819; Kostelny et al., J. Immunol. 148:1547-1553 (1992).

[0173] Antibodies of the present invention may be described or specified in terms of the epitope(s) or portion(s) of a polypeptide of the present invention which they recognize or specifically bind. The epitope(s) or polypeptide portion(s) may be specified as described herein, e.g., by N-terminal and C-terminal positions, or by size in contiguous amino acid residues. Antibodies which specifically bind any epitope or polypeptide of the present invention may also be excluded. Therefore, the present invention includes antibodies that specifically bind polypeptides of the present invention, and allows for the exclusion of the same.

[0174] Antibodies of the present invention may also be described or specified in terms of their cross-reactivity. Antibodies that do not bind any other analog, ortholog, or homolog of a polypeptide of the present invention are included. Antibodies that bind polypeptides with at least 95%, at least 90%, at least 85%, at least 80%, at least 75%, at least 70%, at least 65%, at least 60%, at least 55%, and at least 50% identity (as calculated using methods known in the art and described herein) to a polypeptide of the present invention are also included in the present invention. In specific embodiments, antibodies of the present invention cross-react with murine, rat and/or rabbit homologs of human proteins and the corresponding epitopes thereof. Antibodies that do not bind polypeptides with less than 95%, less than 90%, less than 85%, less than 80%, less than 75%, less than 70%, less than 65%, less than 60%, less than 55%, and less than 50% identity (as calculated using methods known in the art and described herein) to a polypeptide of the present invention are also included in the present invention. In a specific embodiment, the above-described cross-reactivity is with respect to any single specific antigenic or immunogenic polypeptide, or combination(s) of 2, 3, 4, 5, or more of the specific antigenic and/or immunogenic polypeptides disclosed herein. Further included in the present invention are antibodies which bind polypeptides encoded by polynucleotides which hybridize to a polynucleotide of the present invention under stringent hybridization conditions (as described herein). Antibodies of the present invention may also be described or specified in terms of their binding affinity to a polypeptide of the invention. Preferred binding affinities include those with a dissociation constant or Kd less than 5×10⁻² M, 10⁻² M, 5×10⁻³ M, 10⁻³ M, 5×10⁻⁴ M, 10⁻⁴ M, 5×10⁻⁵ M, 10⁻⁵ M, 5×10⁻⁶ M, 10⁻⁶ M, 5×10⁻⁷ M, 10⁷ M, 5×10⁻⁸ M, 10⁻⁸ M, 5×10⁻⁹ M, 10⁻⁹ M, 5×10⁻¹⁰ M, 10⁻¹⁰ M, 5×10⁻¹¹ M, 10⁻¹¹ M, 5×10⁻¹² M, ¹⁰⁻¹² M, 5×10⁻¹³ M, 10^{—}M, 5×10⁻¹⁴ M, 10⁻¹⁴ M, 5×10⁻¹⁵ M, or ¹⁰⁻¹⁵ M.

[0175] The invention also provides antibodies that competitively inhibit binding of an antibody to an epitope of the invention as determined by any method known in the art for determining competitive binding, for example, the immunoassays described herein. In preferred embodiments, the antibody competitively inhibits binding to the epitope by at least 95%, at least 90%, at least 85%, at least 80%, at least 75%, at least 70%, at least 60%, or at least 50%.

[0176] Antibodies of the present invention may act as agonists or antagonists of the polypeptides of the present invention. For example, the present invention includes antibodies which disrupt the receptor/ligand interactions with the polypeptides of the invention either partially or fully. Preferrably, antibodies of the present invention bind an antigenic epitope disclosed herein, or a portion thereof. The invention features both receptor-specific antibodies and ligand-specific antibodies. The invention also features receptor-specific antibodies which do not prevent ligand binding but prevent receptor activation. Receptor activation (i.e., signaling) may be determined by techniques described herein or otherwise known in the art. For example, receptor activation can be determined by detecting the phosphorylation (e.g., tyrosine or serine/threonine) of the receptor or its substrate by immunoprecipitation followed by western blot analysis (for example, as described supra). In specific embodiments, antibodies are provided that inhibit ligand activity or receptor activity by at least 95%, at least 90%, at least 85%, at least 80%, at least 75%, at least 70%, at least 60%, or at least 50% of the activity in absence of the antibody.

[0177] The invention also features receptor-specific antibodies which both prevent ligand binding and receptor activation as well as antibodies that recognize the receptor-ligand complex, and, preferably, do not specifically recognize the unbound receptor or the unbound ligand. Likewise, included in the invention are neutralizing antibodies which bind the ligand and prevent binding of the ligand to the receptor, as well as antibodies which bind the ligand, thereby preventing receptor activation, but do not prevent the ligand from binding the receptor. Further included in the invention are antibodies which activate the receptor. These antibodies may act as receptor agonists, i.e., potentiate or activate either all or a subset of the biological activities of the ligand-mediated receptor activation, for example, by inducing dimerization of the receptor. The antibodies may be specified as agonists, antagonists or inverse agonists for biological activities comprising the specific biological activities of the peptides of the invention disclosed herein. The above antibody agonists can be made using methods known in the art. See, e.g., PCT publication WO 96/40281; U.S. Pat. No. 5,811,097; Deng et al., Blood 92(6):1981-1988 (1998); Chen et al., Cancer Res. 58(16):3668-3678 (1998); Harrop et al., J. Immunol. 161(4):1786-1794 (1998); Zhu et al., Cancer Res. 58(15):3209-3214 (1998); Yoon et al., J. Immunol. 160(7):3170-3179 (1998); Prat et al., J. Cell. Sci. 111(Pt2):237-247 (1998); Pitard et al., J. Immunol. Methods 205(2):177-190 (1997); Liautard et al., Cytokine 9(4):233-241 (1997); Carlson et al., J. Biol. Chem. 272(17):11295-11301 (1997); Taryman et al., Neuron 14(4):755-762 (1995); Muller et al., Structure 6(9):1153-1167 (1998); Bartunek et al., Cytokine 8(1):14-20 (1996) (which are all incorporated by reference herein in their entireties).

[0178] Antibodies of the present invention may be used, for example, but not limited to, to purify, detect, and target the polypeptides of the present invention, including both in vitro and in vivo diagnostic and therapeutic methods. For example, the antibodies have use in immunoassays for qualitatively and quantitatively measuring levels of the polypeptides of the present invention in biological samples. See, e.g., Harlow et al., Antibodies: A Laboratory Manual, (Cold Spring Harbor Laboratory Press, 2nd ed. 1988) (incorporated by reference herein in its entirety).

[0179] As discussed in more detail below, the antibodies of the present invention may be used either alone or in combination with other compositions. The antibodies may further be recombinantly fused to a heterologous polypeptide at the N- or C-terminus or chemically conjugated (including covalently and non-covalently conjugations) to polypeptides or other compositions. For example, antibodies of the present invention may be recombinantly fused or conjugated to molecules useful as labels in detection assays and effector molecules such as heterologous polypeptides, drugs, radionuclides, or toxins. See, e.g., PCT publications WO 92/08495; WO 91/14438; WO 89/12624; U.S. Pat. No. 5,314,995; and EP 396,387.

[0180] The antibodies of the invention include derivatives that are modified, i.e, by the covalent attachment of any type of molecule to the antibody such that covalent attachment does not prevent the antibody from generating an anti-idiotypic response. For example, but not by way of limitation, the antibody derivatives include antibodies that have been modified, e.g., by glycosylation, acetylation, pegylation, phosphylation, amidation, derivatization by known protecting/blocking groups, proteolytic cleavage, linkage to a cellular ligand or other protein, etc. Any of numerous chemical modifications may be carried out by known techniques, including, but not limited to specific chemical cleavage, acetylation, formylation, metabolic synthesis of tunicamycin, etc. Additionally, the derivative may contain one or more non-classical amino acids.

[0181] The antibodies of the present invention may be generated by any suitable method known in the art. Polyclonal antibodies to an antigen-of-interest can be produced by various procedures well known in the art. For example, a polypeptide of the invention can be administered to various host animals including, but not limited to, rabbits, mice, rats, etc. to induce the production of sera containing polyclonal antibodies specific for the antigen. Various adjuvants may be used to increase the immunological response, depending on the host species, and include but are not limited to, Freund's (complete and incomplete), mineral gels such as aluminum hydroxide, surface active substances such as lysolecithin, pluronic polyols, polyanions, peptides, oil emulsions, keyhole limpet hemocyanins, dinitrophenol, and potentially useful human adjuvants such as BCG (bacille Calmette-Guerin) and corynebacterium parvum. Such adjuvants are also well known in the art.

[0182] Monoclonal antibodies can be prepared using a wide variety of techniques known in the art including the use of hybridoma, recombinant, and phage display technologies, or a combination thereof. For example, monoclonal antibodies can be produced using hybridoma techniques including those known in the art and taught, for example, in Harlow et al., Antibodies: A Laboratory Manual, (Cold Spring Harbor Laboratory Press, 2nd ed. 1988); Hammerling, et al., in: Monoclonal Antibodies and T-Cell Hybridomas 563-681 (Elsevier, N.Y., 1981) (said references incorporated by reference in their entireties). The term “monoclonal antibody” as used herein is not limited to antibodies produced through hybridoma technology. The term “monoclonal antibody” refers to an antibody that is derived from a single clone, including any eukaryotic, prokaryotic, or phage clone, and not the method by which it is produced.

[0183] Methods for producing and screening for specific antibodies using hybridoma technology are routine and well known in the art and are discussed in detail in the Examples. In a non-limiting example, mice can be immunized with a polypeptide of the invention or a cell expressing such peptide. Once an immune response is detected, e.g., antibodies specific for the antigen are detected in the mouse serum, the mouse spleen is harvested and splenocytes isolated. The splenocytes are then fused by well known techniques to any suitable myeloma cells, for example cells from cell line SP20 available from the ATCC. Hybridomas are selected and cloned by limited dilution. The hybridoma clones are then assayed by methods known in the art for cells that secrete antibodies capable of binding a polypeptide of the invention. Ascites fluid, which generally contains high levels of antibodies, can be generated by immunizing mice with positive hybridoma clones.

[0184] Accordingly, the present invention provides methods of generating monoclonal antibodies as well as antibodies produced by the method comprising culturing a hybridoma cell secreting an antibody of the invention wherein, preferably, the hybridoma is generated by fusing splenocytes isolated from a mouse immunized with an antigen of the invention with myeloma cells and then screening the hybridomas resulting from the fusion for hybridoma clones that secrete an antibody able to bind a polypeptide of the invention.

[0185] Antibody fragments which recognize specific epitopes may be generated by known techniques. For example, Fab and F(ab′)2 fragments of the invention may be produced by proteolytic cleavage of immunoglobulin molecules, using enzymes such as papain (to produce Fab fragments) or pepsin (to produce F(ab′)2 fragments). F(ab′)2 fragments contain the variable region, the light chain constant region and the CH1 domain of the heavy chain.

[0186] For example, the antibodies of the present invention can also be generated using various phage display methods known in the art. In phage display methods, functional antibody domains are displayed on the surface of phage particles which carry the polynucleotide sequences encoding them. In a particular embodiment, such phage can be utilized to display antigen binding domains expressed from a repertoire or combinatorial antibody library (e.g., human or murine). Phage expressing an antigen binding domain that binds the antigen of interest can be selected or identified with antigen, e.g., using labeled antigen or antigen bound or captured to a solid surface or bead. Phage used in these methods are typically filamentous phage including fd and M13 binding domains expressed from phage with Fab, Fv or disulfide stabilized Fv antibody domains recombinantly fused to either the phage gene III or gene VIII protein. Examples of phage display methods that can be used to make the antibodies of the present invention include those disclosed in Brinkman et al., J. Immunol. Methods 182:41-50 (1995); Ames et al., J. Immunol. Methods 184:177-186 (1995); Kettleborough et al., Eur. J. Immunol. 24:952-958 (1994); Persic et al., Gene 187 9-18 (1997); Burton et al., Advances in Immunology 57:191-280 (1994); PCT application No. PCT/GB91/01134; PCT publications WO 90/02809; WO 91/10737; WO 92/01047; WO 92/18619; WO 93/11236; WO 95/15982; WO 95/20401; and U.S. Pat. Nos. 5,698,426; 5,223,409; 5,403,484; 5,580,717; 5,427,908; 5,750,753; 5,821,047; 5,571,698; 5,427,908; 5,516,637; 5,780,225; 5,658,727; 5,733,743 and 5,969,108; each of which is incorporated herein by reference in its entirety.

[0187] As described in the above references, after phage selection, the antibody coding regions from the phage can be isolated and used to generate whole antibodies, including human antibodies, or any other desired antigen binding fragment, and expressed in any desired host, including mammalian cells, insect cells, plant cells, yeast, and bacteria, e.g., as described in detail below. For example, techniques to recombinantly produce Fab, Fab′ and F(ab)2 fragments can also be employed using methods known in the art such as those disclosed in PCT publication WO 92/22324; Mullinax et al., BioTechniques 12(6):864-869 (1992); and Sawai et al., AJRI 34:26-34 (1995); and Better et al., Science 240:1041-1043 (1988) (said references incorporated by reference in their entireties).

[0188] Examples of techniques which can be used to produce single-chain Fvs and antibodies include those described in U.S. Pat. Nos. 4,946,778 and 5,258,498; Huston et al., Methods in Enzymology 203:46-88 (1991); Shu et al., PNAS 90:7995-7999 (1993); and Skerra et al., Science 240:1038-1040 (1988). For some uses, including in vivo use of antibodies in humans and in vitro detection assays, it may be preferable to use chimeric, humanized, or human antibodies. A chimeric antibody is a molecule in which different portions of the antibody are derived from different animal species, such as antibodies having a variable region derived from a murine monoclonal antibody and a human immunoglobulin constant region. Methods for producing chimeric antibodies are known in the art. See e.g., Morrison, Science 229:1202 (1985); Oi et al., BioTechniques 4:214 (1986); Gillies et al., (1989) J. Immunol. Methods 125:191-202; U.S. Pat. Nos. 5,807,715; 4,816,567; and 4,816397, which are incorporated herein by reference in their entirety. Humanized antibodies are antibody molecules from non-human species antibody that binds the desired antigen having one or more complementarity determining regions (CDRs) from the non-human species and a framework regions from a human immunoglobulin molecule. Often, framework residues in the human framework regions will be substituted with the corresponding residue from the CDR donor antibody to alter, preferably improve, antigen binding. These framework substitutions are identified by methods well known in the art, e.g., by modeling of the interactions of the CDR and framework residues to identify framework residues important for antigen binding and sequence comparison to identify unusual framework residues at particular positions. (See, e.g., Queen et al., U.S. Pat. No. 5,585,089; Riechmann et al., Nature 332:323 (1988), which are incorporated herein by reference in their entireties.) Antibodies can be humanized using a variety of techniques known in the art including, for example, CDR-grafting (EP 239,400; PCT publication WO 91/09967; U.S. Pat. Nos. 5,225,539; 5,530,101; and 5,585,089), veneering or resurfacing (EP 592,106; EP 519,596; Padlan, Molecular Immunology 28(4/5):489-498 (1991); Studnicka et al., Protein Engineering 7(6):805-814 (1994); Roguska. et al., PNAS 91:969-973 (1994)), and chain shuffling (U.S. Pat. No. 5,565,332).

[0189] Completely human antibodies are particularly desirable for therapeutic treatment of human patients. Human antibodies can be made by a variety of methods known in the art including phage display methods described above using antibody libraries derived from human immunoglobulin sequences. See also, U.S. Pat. Nos. 4,444,887 and 4,716,111; and PCT publications WO 98/46645, WO 98/50433, WO 98/24893, WO 98/16654, WO 96/34096, WO 96/33735, and WO 91/10741; each of which is incorporated herein by reference in its entirety.

[0190] Human antibodies can also be produced using transgenic mice which are incapable of expressing functional endogenous immunoglobulins, but which can express human immunoglobulin genes. For example, the human heavy and light chain immunoglobulin gene complexes may be introduced randomly or by homologous recombination into mouse embryonic stem cells. Alternatively, the human variable region, constant region, and diversity region may be introduced into mouse embryonic stem cells in addition to the human heavy and light chain genes. The mouse heavy and light chain immunoglobulin genes may be rendered non-functional separately or simultaneously with the introduction of human immunoglobulin loci by homologous recombination. In particular, homozygous deletion of the JH region prevents endogenous antibody production. The modified embryonic stem cells are expanded and microinjected into blastocysts to produce chimeric mice. The chimeric mice are then bred to produce homozygous offspring which express human antibodies. The transgenic mice are immunized in the normal fashion with a selected antigen, e.g., all or a portion of a polypeptide of the invention. Monoclonal antibodies directed against the antigen can be obtained from the immunized, transgenic mice using conventional hybridoma technology. The human immunoglobulin transgenes harbored by the transgenic mice rearrange during B cell differentiation, and subsequently undergo class switching and somatic mutation. Thus, using such a technique, it is possible to produce therapeutically useful IgG, IgA, IgM and IgE antibodies. For an overview of this technology for producing human antibodies, see Lonberg and Huszar, Int. Rev. Immunol. 13:65-93 (1995). For a detailed discussion of this technology for producing human antibodies and human monoclonal antibodies and protocols for producing such antibodies, see, e.g., PCT publications WO 98/24893; WO 92/01047; WO 96/34096; WO 96/33735; European Patent No. 0 598 877; U.S. Pat. Nos. 5,413,923; 5,625,126; 5,633,425; 5,569,825; 5,661,016; 5,545,806; 5,814,318; 5,885,793; 5,916,771; and 5,939,598, which are incorporated by reference herein in their entirety. In addition, companies such as Abgenix, Inc. (Freemont, Calif.) and Genpharm (San Jose, Calif.) can be engaged to provide human antibodies directed against a selected antigen using technology similar to that described above.

[0191] Completely human antibodies which recognize a selected epitope can be generated using a technique referred to as “guided selection.” In this approach a selected non-human monoclonal antibody, e.g., a mouse antibody, is used to guide the selection of a completely human antibody recognizing the same epitope. (Jespers et al., Bio/technology 12:899-903 (1988)).

[0192] Further, antibodies to the polypeptides of the invention can, in turn, be utilized to generate anti-idiotype antibodies that “mimic” polypeptides of the invention using techniques well known to those skilled in the art. (See, e.g., Greenspan & Bona, FASEB J. 7(5):437-444; (1989) and Nissinoff, J. Immunol. 147(8):2429-2438 (1991)). For example, antibodies which bind to and competitively inhibit polypeptide multimerization and/or binding of a polypeptide of the invention to a ligand can be used to generate anti-idiotypes that “mimic” the polypeptide multimerization and/or binding domain and, as a consequence, bind to and neutralize polypeptide and/or its ligand. Such neutralizing anti-idiotypes or Fab fragments of such anti-idiotypes can be used in therapeutic regimens to neutralize polypeptide ligand. For example, such anti-idiotypic antibodies can be used to bind a polypeptide of the invention and/or to bind its ligands/receptors, and thereby block its biological activity.

[0193] Polynucleotides Encoding Antibodies

[0194] The invention further provides polynucleotides comprising a nucleotide sequence encoding an antibody of the invention and fragments thereof. The invention also encompasses polynucleotides that hybridize under stringent or alternatively, under lower stringency hybridization conditions, e.g., as defined supra, to polynucleotides that encode an antibody, preferably, that specifically binds to a polypeptide of the invention, preferably, an antibody that binds to a polypeptide having the amino acid sequence of SEQ ID NO:Y.

[0195] The polynucleotides may be obtained, and the nucleotide sequence of the polynucleotides determined, by any method known in the art. For example, if the nucleotide sequence of the antibody is known, a polynucleotide encoding the antibody may be assembled from chemically synthesized oligonucleotides (e.g., as described in Kutmeier et al., BioTechniques 17:242 (1994)), which, briefly, involves the synthesis of overlapping oligonucleotides containing portions of the sequence encoding the antibody, annealing and ligating of those oligonucleotides, and then amplification of the ligated oligonucleotides by PCR.

[0196] Alternatively, a polynucleotide encoding an antibody may be generated from nucleic acid from a suitable source. If a clone containing a nucleic acid encoding a particular antibody is not available, but the sequence of the antibody molecule is known, a nucleic acid encoding the immunoglobulin may be chemically synthesized or obtained from a suitable source (e.g., an antibody cDNA library, or a cDNA library generated from, or nucleic acid, preferably poly A+RNA, isolated from, any tissue or cells expressing the antibody, such as hybridoma cells selected to express an antibody of the invention) by PCR amplification using synthetic primers hybridizable to the 3′ and 5′ ends of the sequence or by cloning using an oligonucleotide probe specific for the particular gene sequence to identify, e.g., a cDNA clone from a cDNA library that encodes the antibody. Amplified nucleic acids generated by PCR may then be cloned into replicable cloning vectors using any method well known in the art.

[0197] Once the nucleotide sequence and corresponding amino acid sequence of the antibody is determined, the nucleotide sequence of the antibody may be manipulated using methods well known in the art for the manipulation of nucleotide sequences, e.g., recombinant DNA techniques, site directed mutagenesis, PCR, etc. (see, for example, the techniques described in Sambrook et al., 1990, Molecular Cloning, A Laboratory Manual, 2d Ed., Cold Spring Harbor Laboratory, Cold Spring Harbor, N.Y. and Ausubel et al., eds., 1998, Current Protocols in Molecular Biology, John Wiley & Sons, NY, which are both incorporated by reference herein in their entireties ), to generate antibodies having a different amino acid sequence, for example to create amino acid substitutions, deletions, and/or insertions.

[0198] In a specific embodiment, the amino acid sequence of the heavy and/or light chain variable domains may be inspected to identify the sequences of the complementarity determining regions (CDRs) by methods that are well know in the art, e.g., by comparison to known amino acid sequences of other heavy and light chain variable regions to determine the regions of sequence hypervariability. Using routine recombinant DNA techniques, one or more of the CDRs may be inserted within framework regions, e.g., into human framework regions to humanize a non-human antibody, as described supra. The framework regions may be naturally occurring or consensus framework regions, and preferably human framework regions (see, e.g., Chothia et al., J. Mol. Biol. 278: 457-479 (1998) for a listing of human framework regions). Preferably, the polynucleotide generated by the combination of the framework regions and CDRs encodes an antibody that specifically binds a polypeptide of the invention. Preferably, as discussed supra, one or more amino acid substitutions may be made within the framework regions, and, preferably, the amino acid substitutions improve binding of the antibody to its antigen. Additionally, such methods may be used to make amino acid substitutions or deletions of one or more variable region cysteine residues participating in an intrachain disulfide bond to generate antibody molecules lacking one or more intrachain disulfide bonds. Other alterations to the polynucleotide are encompassed by the present invention and within the skill of the art.

[0199] In addition, techniques developed for the production of “chimeric antibodies” (Morrison et al., Proc. Natl. Acad. Sci. 81:851-855 (1984); Neuberger et al., Nature 312:604-608 (1984); Takeda et al., Nature 314:452-454 (1985)) by splicing genes from a mouse antibody molecule of appropriate antigen specificity together with genes from a human antibody molecule of appropriate biological activity can be used. As described supra, a chimeric antibody is a molecule in which different portions are derived from different animal species, such as those having a variable region derived from a murine mAb and a human immunoglobulin constant region, e.g., humanized antibodies.

[0200] Alternatively, techniques described for the production of single chain antibodies (U.S. Pat. No. 4,946,778; Bird, Science 242:423-42 (1988); Huston et al., Proc. Natl. Acad. Sci. USA 85:5879-5883 (1988); and Ward et al., Nature 334:544-54 (1989)) can be adapted to produce single chain antibodies. Single chain antibodies are formed by linking the heavy and light chain fragments of the Fv region via an amino acid bridge, resulting in a single chain polypeptide. Techniques for the assembly of functional Fv fragments in E. coli may also be used (Skerra et al., Science 242:1038-1041 (1988)).

[0201] Methods of Producing Antibodies

[0202] The antibodies of the invention can be produced by any method known in the art for the synthesis of antibodies, in particular, by chemical synthesis or preferably, by recombinant expression techniques.

[0203] Recombinant expression of an antibody of the invention, or fragment, derivative or analog thereof, (e.g., a heavy or light chain of an antibody of the invention or a single chain antibody of the invention), requires construction of an expression vector containing a polynucleotide that encodes the antibody. Once a polynucleotide encoding an antibody molecule or a heavy or light chain of an antibody, or portion thereof (preferably containing the heavy or light chain variable domain), of the invention has been obtained, the vector for the production of the antibody molecule may be produced by recombinant DNA technology using techniques well known in the art. Thus, methods for preparing a protein by expressing a polynucleotide containing an antibody encoding nucleotide sequence are described herein. Methods which are well known to those skilled in the art can be used to construct expression vectors containing antibody coding sequences and appropriate transcriptional and translational control signals. These methods include, for example, in vitro recombinant DNA techniques, synthetic techniques, and in vivo genetic recombination. The invention, thus, provides replicable vectors comprising a nucleotide sequence encoding an antibody molecule of the invention, or a heavy or light chain thereof, or a heavy or light chain variable domain, operably linked to a promoter. Such vectors may include the nucleotide sequence encoding the constant region of the antibody molecule (see, e.g., PCT Publication WO 86/05807; PCT Publication WO 89/01036; and U.S. Pat. No. 5,122,464) and the variable domain of the antibody may be cloned into such a vector for expression of the entire heavy or light chain.

[0204] The expression vector is transferred to a host cell by conventional techniques and the transfected cells are then cultured by conventional techniques to produce an antibody of the invention. Thus, the invention includes host cells containing a polynucleotide encoding an antibody of the invention, or a heavy or light chain thereof, or a single chain antibody of the invention, operably linked to a heterologous promoter. In preferred embodiments for the expression of double-chained antibodies, vectors encoding both the heavy and light chains may be co-expressed in the host cell for expression of the entire immunoglobulin molecule, as detailed below.

[0205] A variety of host-expression vector systems may be utilized to express the antibody molecules of the invention. Such host-expression systems represent vehicles by which the coding sequences of interest may be produced and subsequently purified, but also represent cells which may, when transformed or transfected with the appropriate nucleotide coding sequences, express an antibody molecule of the invention in situ. These include but are not limited to microorganisms such as bacteria (e.g., E. coli, B. subtilis) transformed with recombinant bacteriophage DNA, plasmid DNA or cosmid DNA expression vectors containing antibody coding sequences; yeast (e.g., Saccharomyces, Pichia) transformed with recombinant yeast expression vectors containing antibody coding sequences; insect cell systems infected with recombinant virus expression vectors (e.g., baculovirus) containing antibody coding sequences; plant cell systems infected with recombinant virus expression vectors (e.g., cauliflower mosaic virus, CaMV; tobacco mosaic virus, TMV) or transformed with recombinant plasmid expression vectors (e.g., Ti plasmid) containing antibody coding sequences; or mammalian cell systems (e.g., COS, CHO, BHK, 293, 3T3 cells) harboring recombinant expression constructs containing promoters derived from the genome of mammalian cells (e.g., metallothionein promoter) or from mammalian viruses (e.g., the adenovirus late promoter; the vaccinia virus 7.5 K promoter). Preferably, bacterial cells such as Escherichia coli, and more preferably, eukaryotic cells, especially for the expression of whole recombinant antibody molecule, are used for the expression of a recombinant antibody molecule. For example, mammalian cells such as Chinese hamster ovary cells (CHO), in conjunction with a vector such as the major intermediate early gene promoter element from human cytomegalovirus is an effective expression system for antibodies (Foecking et al., Gene 45:101 (1986); Cockett et al., Bio/Technology 8:2 (1990)).

[0206] In bacterial systems, a number of expression vectors may be advantageously selected depending upon the use intended for the antibody molecule being expressed. For example, when a large quantity of such a protein is to be produced, for the generation of pharmaceutical compositions of an antibody molecule, vectors which direct the expression of high levels of fusion protein products that are readily purified may be desirable. Such vectors include, but are not limited, to the E. coli expression vector pUR278 (Ruther et al., EMBO J. 2:1791 (1983)), in which the antibody coding sequence may be ligated individually into the vector in frame with the lac Z coding region so that a fusion protein is produced; pIN vectors (Inouye & Inouye, Nucleic Acids Res. 13:3101-3109 (1985); Van Heeke & Schuster, J. Biol. Chem. 24:5503-5509 (1989)); and the like. pGEX vectors may also be used to express foreign polypeptides as fusion proteins with glutathione S-transferase (GST). In general, such fusion proteins are soluble and can easily be purified from lysed cells by adsorption and binding to matrix glutathione-agarose beads followed by elution in the presence of free glutathione. The pGEX vectors are designed to include thrombin or factor Xa protease cleavage sites so that the cloned target gene product can be released from the GST moiety.

[0207] In an insect system, Autographa californica nuclear polyhedrosis virus (AcNPV) is used as a vector to express foreign genes. The virus grows in Spodoptera frugiperda cells. The antibody coding sequence may be cloned individually into non-essential regions (for example the polyhedrin gene) of the virus and placed under control of an AcNPV promoter (for example the polyhedrin promoter).

[0208] In mammalian host cells, a number of viral-based expression systems may be utilized. In cases where an adenovirus is used as an expression vector, the antibody coding sequence of interest may be ligated to an adenovirus transcription/translation control complex, e.g., the late promoter and tripartite leader sequence. This chimeric gene may then be inserted in the adenovirus genome by in vitro or in vivo recombination. Insertion in a non-essential region of the viral genome (e.g., region E1 or E3) will result in a recombinant virus that is viable and capable of expressing the antibody molecule in infected hosts. (e.g., see Logan & Shenk, Proc. Natl. Acad. Sci. USA 81:355-359 (1984)). Specific initiation signals may also be required for efficient translation of inserted antibody coding sequences. These signals include the ATG initiation codon and adjacent sequences. Furthermore, the initiation codon must be in phase with the reading frame of the desired coding sequence to ensure translation of the entire insert. These exogenous translational control signals and initiation codons can be of a variety of origins, both natural and synthetic. The efficiency of expression may be enhanced by the inclusion of appropriate transcription enhancer elements, transcription terminators, etc. (see Bittner et al., Methods in Enzymol. 153:51-544 (1987)).

[0209] In addition, a host cell strain may be chosen which modulates the expression of the inserted sequences, or modifies and processes the gene product in the specific fashion desired. Such modifications (e.g., glycosylation) and processing (e.g., cleavage) of protein products may be important for the function of the protein. Different host cells have characteristic and specific mechanisms for the post-translational processing and modification of proteins and gene products. Appropriate cell lines or host systems can be chosen to ensure the correct modification and processing of the foreign protein expressed. To this end, eukaryotic host cells which possess the cellular machinery for proper processing of the primary transcript, glycosylation, and phosphorylation of the gene product may be used. Such mammalian host cells include but are not limited to CHO, VERY, BHK, Hela, COS, MDCK, 293, 3T3, WI38, and in particular, breast cancer cell lines such as, for example, BT483, Hs578T, HTB2, BT20 and T47D, and normal mammary gland cell line such as, for example, CRL7030 and Hs578Bst.

[0210] For long-term, high-yield production of recombinant proteins, stable expression is preferred. For example, cell lines which stably express the antibody molecule may be engineered. Rather than using expression vectors which contain viral origins of replication, host cells can be transformed with DNA controlled by appropriate expression control elements (e.g., promoter, enhancer, sequences, transcription terminators, polyadenylation sites, etc.), and a selectable marker. Following the introduction of the foreign DNA, engineered cells may be allowed to grow for 1-2 days in an enriched media, and then are switched to a selective media. The selectable marker in the recombinant plasmid confers resistance to the selection and allows cells to stably integrate the plasmid into their chromosomes and grow to form foci which in turn can be cloned and expanded into cell lines. This method may advantageously be used to engineer cell lines which express the antibody molecule. Such engineered cell lines may be particularly useful in screening and evaluation of compounds that interact directly or indirectly with the antibody molecule.

[0211] A number of selection systems may be used, including but not limited to the herpes simplex virus thymidine kinase (Wigler et al., Cell 11:223 (1977)), hypoxanthine-guanine phosphoribosyltransferase (Szybalska & Szybalski, Proc. Natl. Acad. Sci. USA 48:202 (1992)), and adenine phosphoribosyltransferase (Lowy et al., Cell 22:817 (1980)) genes can be employed in tk-, hgprt- or aprt-cells, respectively. Also, antimetabolite resistance can be used as the basis of selection for the following genes: dhfr, which confers resistance to methotrexate (Wigler et al., Natl. Acad. Sci. USA 77:357 (1980); O'Hare et al., Proc. Natl. Acad. Sci. USA 78:1527 (1981)); gpt, which confers resistance to mycophenolic acid (Mulligan & Berg, Proc. Natl. Acad. Sci. USA 78:2072 (1981)); neo, which confers resistance to the aminoglycoside G-418 Clinical Pharmacy 12:488-505; Wu and Wu, Biotherapy 3:87-95 (1991); Tolstoshev, Ann. Rev. Pharmacol. Toxicol. 32:573-596 (1993); Mulligan, Science 260:926-932 (1993); and Morgan and Anderson, Ann. Rev. Biochem. 62:191-217 (1993); May, 1993, TIB TECH 11(5):155-215); and hygro, which confers resistance to hygromycin (Santerre et al., Gene 30:147 (1984)). Methods commonly known in the art of recombinant DNA technology may be routinely applied to select the desired recombinant clone, and such methods are described, for example, in Ausubel et al. (eds.), Current Protocols in Molecular Biology, John Wiley & Sons, NY (1993); Kriegler, Gene Transfer and Expression, A Laboratory Manual, Stockton Press, NY (1990); and in Chapters 12 and 13, Dracopoli et al. (eds), Current Protocols in Human Genetics, John Wiley & Sons, NY (1994); Colberre-Garapin et al., J. Mol. Biol. 150:1 (1981), which are incorporated by reference herein in their entireties.

[0212] The expression levels of an antibody molecule can be increased by vector amplification (for a review, see Bebbington and Hentschel, The use of vectors based on gene amplification for the expression of cloned genes in mammalian cells in DNA cloning, Vol.3. (Academic Press, New York, 1987)). When a marker in the vector system expressing antibody is amplifiable, increase in the level of inhibitor present in culture of host cell will increase the number of copies of the marker gene. Since the amplified region is associated with the antibody gene, production of the antibody will also increase (Crouse et al., Mol. Cell. Biol. 3:257 (1983)).

[0213] The host cell may be co-transfected with two expression vectors of the invention, the first vector encoding a heavy chain derived polypeptide and the second vector encoding a light chain derived polypeptide. The two vectors may contain identical selectable markers which enable equal expression of heavy and light chain polypeptides. Alternatively, a single vector may be used which encodes, and is capable of expressing, both heavy and light chain polypeptides. In such situations, the light chain should be placed before the heavy chain to avoid an excess of toxic free heavy chain (Proudfoot, Nature 322:52 (1986); Kohler, Proc. Natl. Acad. Sci. USA 77:2197 (1980)). The coding sequences for the heavy and light chains may comprise cDNA or genomic DNA.

[0214] Once an antibody molecule of the invention has been produced by an animal, chemically synthesized, or recombinantly expressed, it may be purified by any method known in the art for purification of an immunoglobulin molecule, for example, by chromatography (e.g., ion exchange, affinity, particularly by affinity for the specific antigen after Protein A, and sizing column chromatography), centrifugation, differential solubility, or by any other standard technique for the purification of proteins. In addition, the antibodies of the present invention or fragments thereof can be fused to heterologous polypeptide sequences described herein or otherwise known in the art, to facilitate purification.

[0215] The present invention encompasses antibodies recombinantly fused or chemically conjugated (including both covalently and non-covalently conjugations) to a polypeptide (or portion thereof, preferably at least 10, 20, 30, 40, 50, 60, 70, 80, 90 or 100 amino acids of the polypeptide) of the present invention to generate fusion proteins. The fusion does not necessarily need to be direct, but may occur through linker sequences. The antibodies may be specific for antigens other than polypeptides (or portion thereof, preferably at least 10, 20, 30, 40, 50, 60, 70, 80, 90 or 100 amino acids of the polypeptide) of the present invention. For example, antibodies may be used to target the polypeptides of the present invention to particular cell types, either in vitro or in vivo, by fusing or conjugating the polypeptides of the present invention to antibodies specific for particular cell surface receptors. Antibodies fused or conjugated to the polypeptides of the present invention may also be used in in vitro immunoassays and purification methods using methods known in the art. See e.g., Harbor et al., supra, and PCT publication WO 93/21232; EP 439,095; Naramura et al., Immunol. Lett. 39:91-99 (1994); U.S. Pat. No. 5,474,981; Gillies et al., PNAS 89:1428-1432 (1992); Fell et al., J. Immunol. 146:2446-2452(1991), which are incorporated by reference in their entireties.

[0216] The present invention further includes compositions comprising the polypeptides of the present invention fused or conjugated to antibody domains other than the variable regions. For example, the polypeptides of the present invention may be fused or conjugated to an antibody Fc region, or portion thereof. The antibody portion fused to a polypeptide of the present invention may comprise the constant region, hinge region, CH1 domain, CH2 domain, and CH3 domain or any combination of whole domains or portions thereof. The polypeptides may also be fused or conjugated to the above antibody portions to form multimers. For example, Fc portions fused to the polypeptides of the present invention can form dimers through disulfide bonding between the Fc portions. Higher multimeric forms can be made by fusing the polypeptides to portions of IgA and IgM. Methods for fusing or conjugating the polypeptides of the present invention to antibody portions are known in the art. See, e.g., U.S. Pat. Nos. 5,336,603; 5,622,929; 5,359,046; 5,349,053; 5,447,851; 5,112,946; EP 307,434; EP 367,166; PCT publications WO 96/04388; WO 91/06570; Ashkenazi et al., Proc. Natl. Acad. Sci. USA 88:10535-10539 (1991); Zheng et al., J. Immunol. 154:5590-5600 (1995); and Vil et al., Proc. Natl. Acad. Sci. USA 89:11337-11341(1992) (said references incorporated by reference in their entireties).

[0217] As discussed, supra, the polypeptides corresponding to a polypeptide, polypeptide fragment, or a variant of SEQ ID NO:Y may be fused or conjugated to the above antibody portions to increase the in vivo half life of the polypeptides or for use in immunoassays using methods known in the art. Further, the polypeptides corresponding to SEQ ID NO:Y may be fused or conjugated to the above antibody portions to facilitate purification. One reported example describes chimeric proteins consisting of the first two domains of the human CD4-polypeptide and various domains of the constant regions of the heavy or light chains of mammalian immunoglobulins. (EP 394,827; Traunecker et al., Nature 331:84-86 (1988). The polypeptides of the present invention fused or conjugated to an antibody having disulfide-linked dimeric structures (due to the IgG) may also be more efficient in binding and neutralizing other molecules, than the monomeric secreted protein or protein fragment alone. (Fountoulakis et al., J. Biochem. 270:3958-3964 (1995)). In many cases, the Fc part in a fusion protein is beneficial in therapy and diagnosis, and thus can result in, for example, improved pharmacokinetic properties. (EP A 232,262). Alternatively, deleting the Fc part after the fusion protein has been expressed, detected, and purified, would be desired. For example, the Fc portion may hinder therapy and diagnosis if the fusion protein is used as an antigen for immunizations. In drug discovery, for example, human proteins, such as hIL-5, have been fused with Fc portions for the purpose of high-throughput screening assays to identify antagonists of hIL-5. (See, Bennett et al., J. Molecular Recognition 8:52-58 (1995); Johanson et al., J. Biol. Chem. 270:9459-9471 (1995).

[0218] Moreover, the antibodies or fragments thereof of the present invention can be fused to marker sequences, such as a peptide to facilitate purification. In preferred embodiments, the marker amino acid sequence is a hexa-histidine peptide, such as the tag provided in a pQE vector (QIAGEN, Inc., 9259 Eton Avenue, Chatsworth, Calif., 91311), among others, many of which are commercially available. As described in Gentz et al., Proc. Natl. Acad. Sci. USA 86:821-824 (1989), for instance, hexa-histidine provides for convenient purification of the fusion protein. Other peptide tags useful for purification include, but are not limited to, the “HA” tag, which corresponds to an epitope derived from the influenza hemagglutinin protein (Wilson et al., Cell 37:767 (1984)) and the “flag” tag.

[0219] The present invention further encompasses antibodies or fragments thereof conjugated to a diagnostic or therapeutic agent. The antibodies can be used diagnostically to, for example, monitor the development or progression of a tumor as part of a clinical testing procedure to, e.g., determine the efficacy of a given treatment regimen. Detection can be facilitated by coupling the antibody to a detectable substance. Examples of detectable substances include various enzymes, prosthetic groups, fluorescent materials, luminescent materials, bioluminescent materials, radioactive materials, positron emitting metals using various positron emission tomographies, and nonradioactive paramagnetic metal ions. The detectable substance may be coupled or conjugated either directly to the antibody (or fragment thereof) or indirectly, through an intermediate (such as, for example, a linker known in the art) using techniques known in the art. See, for example, U.S. Pat. No. 4,741,900 for metal ions which can be conjugated to antibodies for use as diagnostics according to the present invention. Examples of suitable enzymes include horseradish peroxidase, alkaline phosphatase, beta-galactosidase, or acetylcholinesterase; examples of suitable prosthetic group complexes include streptavidin/biotin and avidin/biotin; examples of suitable fluorescent materials include umbelliferone, fluorescein, fluorescein isothiocyanate, rhodamine, dichlorotriazinylamine fluorescein, dansyl chloride or phycoerythrin; an example of a luminescent material includes luminol; examples of bioluminescent materials include luciferase, luciferin, and aequorin; and examples of suitable radioactive material include 1251, 1311, 111n or 99Tc.

[0220] Further, an antibody or fragment thereof may be conjugated to a therapeutic moiety such as a cytotoxin, e.g., a cytostatic or cytocidal agent, a therapeutic agent or a radioactive metal ion, e.g., alpha-emitters such as, for example, 213Bi. A cytotoxin or cytotoxic agent includes any agent that is detrimental to cells. Examples include paclitaxol, cytochalasin B, gramicidin D, ethidium bromide, emetine, mitomycin, etoposide, tenoposide, vincristine, vinblastine, colchicin, doxorubicin, daunorubicin, dihydroxy anthracin dione, mitoxantrone, mithramycin, actinomycin D, 1-dehydrotestosterone, glucocorticoids, procaine, tetracaine, lidocaine, propranolol, and puromycin and analogs or homologs thereof. Therapeutic agents include, but are not limited to, antimetabolites (e.g., methotrexate, 6-mercaptopurine, 6-thioguanine, cytarabine, 5-fluorouracil decarbazine), alkylating agents (e.g., mechlorethamine, thioepa chlorambucil, melphalan, carmustine (BSNU) and lomustine (CCNU), cyclothosphamide, busulfan, dibromomannitol, streptozotocin, mitomycin C, and cis-dichlorodiamine platinum (II) (DDP) cisplatin), anthracyclines (e.g., daunorubicin (formerly daunomycin) and doxorubicin), antibiotics (e.g., dactinomycin (formerly actinomycin), bleomycin, mithramycin, and anthramycin (AMC)), and anti-mitotic agents (e.g., vincristine and vinblastine).

[0221] The conjugates of the invention can be used for modifying a given biological response, the therapeutic agent or drug moiety is not to be construed as limited to classical chemical therapeutic agents. For example, the drug moiety may be a protein or polypeptide possessing a desired biological activity. Such proteins may include, for example, a toxin such as abrin, ricin A, pseudomonas exotoxin, or diphtheria toxin; a protein such as tumor necrosis factor, a-interferon, β-interferon, nerve growth factor, platelet derived growth factor, tissue plasminogen activator, an apoptotic agent, e.g., TNF-alpha, TNF-beta, AIM I (See, International Publication No. WO 97/33899), AIM II (See, International Publication No. WO 97/34911), Fas Ligand (Takahashi et al., Int. Immunol., 6:1567-1574 (1994)), VEGI (See, International Publication No. WO 99/23105), a thrombotic agent or an anti-angiogenic agent, e.g., angiostatin or endostatin; or, biological response modifiers such as, for example, lymphokines, interleukin-1 (“IL-1”), interleukin-2 (“IL-2”), interleukin-6 (“IL-6”), granulocyte macrophage colony stimulating factor (“GM-CSF”), granulocyte colony stimulating factor (“G-CSF”), or other growth factors.

[0222] Antibodies may also be attached to solid supports, which are particularly useful for immunoassays or purification of the target antigen. Such solid supports include, but are not limited to, glass, cellulose, polyacrylamide, nylon, polystyrene, polyvinyl chloride or polypropylene.

[0223] Techniques for conjugating such therapeutic moiety to antibodies are well known, see, e.g., Arnon et al., “Monoclonal Antibodies For Immunotargeting Of Drugs In Cancer Therapy”, in Monoclonal Antibodies And Cancer Therapy, Reisfeld et al. (eds.), pp. 243-56 (Alan R. Liss, Inc. 1985); Hellstrom et al., “Antibodies For Drug Delivery”, in Controlled Drug Delivery (2nd Ed.), Robinson et al. (eds.), pp. 623-53 (Marcel Dekker, Inc. 1987); Thorpe, “Antibody Carriers Of Cytotoxic Agents In Cancer Therapy: A Review”, in Monoclonal Antibodies '84: Biological And Clinical Applications, Pinchera et al. (eds.), pp. 475-506 (1985); “Analysis, Results, And Future Prospective Of The Therapeutic Use Of Radiolabeled Antibody In Cancer Therapy”, in Monoclonal Antibodies For Cancer Detection And Therapy, Baldwin et al. (eds.), pp. 303-16 (Academic Press 1985), and Thorpe et al., “The Preparation And Cytotoxic Properties Of Antibody-Toxin Conjugates”, Immunol. Rev. 62:119-58 (1982).

[0224] Alternatively, an antibody can be conjugated to a second antibody to form an antibody heteroconjugate as described by Segal in U.S. Pat. No. 4,676,980, which is incorporated herein by reference in its entirety.

[0225] An antibody, with or without a therapeutic moiety conjugated to it, administered alone or in combination with cytotoxic factor(s) and/or cytokine(s) can be used as a therapeutic.

[0226] Immunophenotyping

[0227] The antibodies of the invention may be utilized for immunophenotyping of cell lines and biological samples. The translation product of the gene of the present invention may be useful as a cell specific marker, or more specifically as a

[0228] cellular marker that is differentially expressed at various stages of differentiation and/or maturation of particular cell types. Monoclonal antibodies directed against a specific epitope, or combination of epitopes, will allow for the screening of cellular populations expressing the marker. Various techniques can be utilized using monoclonal antibodies to screen for cellular populations expressing the marker(s), and include magnetic separation using antibody-coated magnetic beads, “panning” with antibody attached to a solid matrix (i.e., plate), and flow cytometry (See, e.g., U.S. Pat. No. 5,985,660; and Morrison et al., Cell, 96:737-49 (1999)).

[0229] These techniques allow for the screening of particular populations of cells, such as might be found with hematological malignancies (i.e. minimal residual disease (MRD) in acute leukemic patients) and “non-self” cells in transplantations to prevent Graft-versus-Host Disease (GVHD). Alternatively, these techniques allow for the screening of hematopoietic stem and progenitor cells capable of undergoing proliferation and/or differentiation, as might be found in human umbilical cord blood.

[0230] Assays For Antibody Binding

[0231] The antibodies of the invention may be assayed for immunospecific binding by any method known in the art. The immunoassays which can be used include but are not limited to competitive and non-competitive assay systems using techniques such as western blots, radioimmunoassays, ELISA (enzyme linked immunosorbent assay), “sandwich” immunoassays, immunoprecipitation assays, precipitin reactions, gel diffusion precipitin reactions, immunodiffusion assays, agglutination assays, complement-fixation assays, immunoradiometric assays, fluorescent immunoassays, protein A immunoassays, to name but a few. Such assays are routine and well known in the art (see, e.g., Ausubel et al, eds, 1994, Current Protocols in Molecular Biology, Vol. 1, John Wiley & Sons, Inc., New York, which is incorporated by reference herein in its entirety). Exemplary immunoassays are described briefly below (but are not intended by way of limitation).

[0232] Immunoprecipitation protocols generally comprise lysing a population of cells in a lysis buffer such as RIPA buffer (1% NP-40 or Triton X-100, 1% sodium deoxycholate, 0.1% SDS, 0.15 M NaCl, 0.01 M sodium phosphate at pH 7.2, 1% Trasylol) supplemented with protein phosphatase and/or protease inhibitors (e.g., EDTA, PMSF, aprotinin, sodium vanadate), adding the antibody of interest to the cell lysate, incubating for a period of time (e.g., 1-4 hours) at 4° C., adding protein A and/or protein G sepharose beads to the cell lysate, incubating for about an hour or more at 4° C., washing the beads in lysis buffer and resuspending the beads in SDS/sample buffer. The ability of the antibody of interest to immunoprecipitate a particular antigen can be assessed by, e.g., western blot analysis. One of skill in the art would be knowledgeable as to the parameters that can be modified to increase the binding of the antibody to an antigen and decrease the background (e.g., pre-clearing the cell lysate with sepharose beads). For further discussion regarding immunoprecipitation protocols see, e.g., Ausubel et al, eds, 1994, Current Protocols in Molecular Biology, Vol. 1, John Wiley & Sons, Inc., New York at 10.16.1.

[0233] Western blot analysis generally comprises preparing protein samples, electrophoresis of the protein samples in a polyacrylamide gel (e.g., 8%-20% SDS-PAGE depending on the molecular weight of the antigen), transferring the protein sample from the polyacrylamide gel to a membrane such as nitrocellulose, PVDF or nylon, blocking the membrane in blocking solution (e.g., PBS with 3% BSA or non-fat milk), washing the membrane in washing buffer (e.g., PBS-Tween 20), blocking the membrane with primary antibody (the antibody of interest) diluted in blocking buffer, washing the membrane in washing buffer, blocking the membrane with a secondary antibody (which recognizes the primary antibody, e.g., an anti-human antibody) conjugated to an enzymatic substrate (e.g., horseradish peroxidase or alkaline phosphatase) or radioactive molecule (e.g., 32P or 125I) diluted in blocking buffer, washing the membrane in wash buffer, and detecting the presence of the antigen. One of skill in the art would be knowledgeable as to the parameters that can be modified to increase the signal detected and to reduce the background noise. For further discussion regarding western blot protocols see, e.g., Ausubel et al, eds, 1994, Current Protocols in Molecular Biology, Vol. 1, John Wiley & Sons, Inc., New York at 10.8.1.

[0234] ELISAs comprise preparing antigen, coating the well of a 96 well microtiter plate with the antigen, adding the antibody of interest conjugated to a detectable compound such as an enzymatic substrate (e.g., horseradish peroxidase or alkaline phosphatase) to the well and incubating for a period of time, and detecting the presence of the antigen. In ELISAs the antibody of interest does not have to be conjugated to a detectable compound; instead, a second antibody (which recognizes the antibody of interest) conjugated to a detectable compound may be added to the well. Further, instead of coating the well with the antigen, the antibody may be coated to the well. In this case, a second antibody conjugated to a detectable compound may be added following the addition of the antigen of interest to the coated well. One of skill in the art would be knowledgeable as to the parameters that can be modified to increase the signal detected as well as other variations of ELISAs known in the art. For further discussion regarding ELISAs see, e.g., Ausubel et al, eds, 1994, Current Protocols in Molecular Biology, Vol. 1, John Wiley & Sons, Inc., New York at 11.2.1.

[0235] The binding affinity of an antibody to an antigen and the off-rate of an antibody-antigen interaction can be determined by competitive binding assays. One example of a competitive binding assay is a radioimmunoassay comprising the incubation of labeled antigen (e.g., 3H or 125I) with the antibody of interest in the presence of increasing amounts of unlabeled antigen, and the detection of the antibody bound to the labeled antigen. The affinity of the antibody of interest for a particular antigen and the binding off-rates can be determined from the data by scatchard plot analysis. Competition with a second antibody can also be determined using radioimmunoassays. In this case, the antigen is incubated with antibody of interest conjugated to a labeled compound (e.g., 3H or 125I) in the presence of increasing amounts of an unlabeled second antibody.

[0236] Therapeutic Uses

[0237] The present invention is further directed to antibody-based therapies which involve administering antibodies of the invention to an animal, preferably a mammal, and most preferably a human, patient for treating one or more of the disclosed diseases, disorders, or conditions. Therapeutic compounds of the invention include, but are not limited to, antibodies of the invention (including fragments, analogs and derivatives thereof as described herein) and nucleic acids encoding antibodies of the invention (including fragments, analogs and derivatives thereof and anti-idiotypic antibodies as described herein). The antibodies of the invention can be used to treat, inhibit or prevent diseases, disorders or conditions associated with aberrant expression and/or activity of a polypeptide of the invention, including, but not limited to, any one or more of the diseases, disorders, or conditions described herein. The treatment and/or prevention of diseases, disorders, or conditions associated with aberrant expression and/or activity of a polypeptide of the invention includes, but is not limited to, alleviating symptoms associated with those diseases, disorders or conditions. Antibodies of the invention may be provided in pharmaceutically acceptable compositions as known in the art or as described herein.

[0238] A summary of the ways in which the antibodies of the present invention may be used therapeutically includes binding polynucleotides or polypeptides of the present invention locally or systemically in the body or by direct cytotoxicity of the antibody, e.g. as mediated by complement (CDC) or by effector cells (ADCC). Some of these approaches are described in more detail below. Armed with the teachings provided herein, one of ordinary skill in the art will know how to use the antibodies of the present invention for diagnostic, monitoring or therapeutic purposes without undue experimentation.

[0239] The antibodies of this invention may be advantageously utilized in combination with other monoclonal or chimeric antibodies, or with lymphokines or hematopoietic growth factors (such as, e.g., IL-2, IL-3 and IL-7), for example, which serve to increase the number or activity of effector cells which interact with the antibodies.

[0240] The antibodies of the invention may be administered alone or in combination with other types of treatments (e.g., radiation therapy, chemotherapy, hormonal therapy, immunotherapy and anti-tumor agents). Generally, administration of products of a species origin or species reactivity (in the case of antibodies) that is the same species as that of the patient is preferred. Thus, in a preferred embodiment, human antibodies, fragments derivatives, analogs, or nucleic acids, are administered to a human patient for therapy or prophylaxis.

[0241] It is preferred to use high affinity and/or potent in vivo inhibiting and/or neutralizing antibodies against polypeptides or polynucleotides of the present invention, fragments or regions thereof, for both immunoassays directed to and therapy of disorders related to polynucleotides or polypeptides, including fragments thereof, of the present invention. Such antibodies, fragments, or regions, will preferably have an affinity for polynucleotides or polypeptides of the invention, including fragments thereof. Preferred binding affinities include those with a dissociation constant or Kd less than 5×10⁻² M, 10⁻² M, 5×10⁻³ M, 10⁻³ M, 5×10⁻⁴ M, 10⁻⁴ M, 5×10⁻⁵ M, 10⁻⁵ M, 5×10⁻⁶ M, 10⁻⁶ M, 5×10⁻⁷ M, 10⁻⁷ M, 5×10⁻⁸ M, 10⁻⁸ M, 5×10⁻⁹ M, 10⁻⁹ M, 5×10⁻¹⁰ M, 10⁻¹⁰ M, 5×10⁻¹¹ M, 10⁻M, 5×10⁻¹² M, 10⁻¹² M, 5×10⁻¹³ M, 10⁻¹³ M, 5×10⁻¹⁴ M, 10^{‘14} M, 5×10⁻¹⁵ M, and 10⁻¹⁵ M.

[0242] Gene Therapy

[0243] In a specific embodiment, nucleic acids comprising sequences encoding antibodies or functional derivatives thereof, are administered to treat, inhibit or prevent a disease or disorder associated with aberrant expression and/or activity of a polypeptide of the invention, by way of gene therapy. Gene therapy refers to therapy performed by the administration to a subject of an expressed or expressible nucleic acid. In this embodiment of the invention, the nucleic acids produce their encoded protein that mediates a therapeutic effect.

[0244] Any of the methods for gene therapy available in the art can be used according to the present invention. Exemplary methods are described below.

[0245] For general reviews of the methods of gene therapy, see Goldspiel et al., Clinical Pharmacy 12:488-505 (1993); Wu and Wu, Biotherapy 3:87-95 (1991); Tolstoshev, Ann. Rev. Pharmacol. Toxicol. 32:573-596 (1993); Mulligan, Science 260:926-932 (1993); and Morgan and Anderson, Ann. Rev. Biochem. 62:191-217 (1993); May, TIBTECH 11(5):155-215 (1993). Methods commonly known in the art of recombinant DNA technology which can be used are described in Ausubel et al. (eds.), Current Protocols in Molecular Biology, John Wiley & Sons, NY (1993); and Kriegler, Gene Transfer and Expression, A Laboratory Manual, Stockton Press, NY (1990).

[0246] In a preferred aspect, the compound comprises nucleic acid sequences encoding an antibody, said nucleic acid sequences being part of expression vectors that express the antibody or fragments or chimeric proteins or heavy or light chains thereof in a suitable host. In particular, such nucleic acid sequences have promoters operably linked to the antibody coding region, said promoter being inducible or constitutive, and, optionally, tissue-specific. In another particular embodiment, nucleic acid molecules are used in which the antibody coding sequences and any other desired sequences are flanked by regions that promote homologous recombination at a desired site in the genome, thus providing for intrachromosomal expression of the antibody encoding nucleic acids (Koller and Smithies, Proc. Natl. Acad. Sci. USA 86:8932-8935 (1989); Zijlstra et al., Nature 342:435-438 (1989). In specific embodiments, the expressed antibody molecule is a single chain antibody; alternatively, the nucleic acid sequences include sequences encoding both the heavy and light chains, or fragments thereof, of the antibody.

[0247] Delivery of the nucleic acids into a patient may be either direct, in which case the patient is directly exposed to the nucleic acid or nucleic acid-carrying vectors, or indirect, in which case, cells are first transformed with the nucleic acids in vitro, then transplanted into the patient. These two approaches are known, respectively, as in vivo or ex vivo gene therapy.

[0248] In a specific embodiment, the nucleic acid sequences are directly administered in vivo, where it is expressed to produce the encoded product. This can be accomplished by any of numerous methods known in the art, e.g., by constructing them as part of an appropriate nucleic acid expression vector and administering it so that they become intracellular, e.g., by infection using defective or attenuated retrovirals or other viral vectors (see U.S. Pat. No. 4,980,286), or by direct injection of naked DNA, or by use of microparticle bombardment (e.g., a gene gun; Biolistic, Dupont), or coating with lipids or cell-surface receptors or transfecting agents, encapsulation in liposomes, microparticles, or microcapsules, or by administering them in linkage to a peptide which is known to enter the nucleus, by administering it in linkage to a ligand subject to receptor-mediated endocytosis (see, e.g., Wu and Wu, J. Biol. Chem. 262:4429-4432 (1987)) (which can be used to target cell types specifically expressing the receptors), etc. In another embodiment, nucleic acid-ligand complexes can be formed in which the ligand comprises a fusogenic viral peptide to disrupt endosomes, allowing the nucleic acid to avoid lysosomal degradation. In yet another embodiment, the nucleic acid can be targeted in vivo for cell specific uptake and expression, by targeting a specific receptor (see, e.g., PCT Publications WO 92/06180; WO 92/22635; WO92/20316; WO93/14188, WO 93/20221). Alternatively, the nucleic acid can be introduced intracellularly and incorporated within host cell DNA for expression, by homologous recombination (Koller and Smithies, Proc. Natl. Acad. Sci. USA 86:8932-8935 (1989); Zijlstra et al., Nature 342:435-438 (1989)).

[0249] In a specific embodiment, viral vectors that contains nucleic acid sequences encoding an antibody of the invention are used. For example, a retroviral vector can be used (see Miller et al., Meth. Enzymol. 217:581-599 (1993)). These retroviral vectors contain the components necessary for the correct packaging of the viral genome and integration into the host cell DNA. The nucleic acid sequences encoding the antibody to be used in gene therapy are cloned into one or more vectors, which facilitates delivery of the gene into a patient. More detail about retroviral vectors can be found in Boesen et al., Biotherapy 6:291-302 (1994), which describes the use of a retroviral vector to deliver the mdr1 gene to hematopoietic stem cells in order to make the stem cells more resistant to chemotherapy. Other references illustrating the use of retroviral vectors in gene therapy are: Clowes et al., J. Clin. Invest. 93:644-651 (1994); Kiem et al., Blood 83:1467-1473 (1994); Salmons and Gunzberg, Human Gene Therapy 4:129-141 (1993); and Grossman and Wilson, Curr. Opin. in Genetics and Devel. 3:110-114 (1993).

[0250] Adenoviruses are other viral vectors that can be used in gene therapy. Adenoviruses are especially attractive vehicles for delivering genes to respiratory epithelia. Adenoviruses naturally infect respiratory epithelia where they cause a mild disease. Other targets for adenovirus-based delivery systems are liver, the central nervous system, endothelial cells, and muscle. Adenoviruses have the advantage of being capable of infecting non-dividing cells. Kozarsky and Wilson, Current Opinion in Genetics and Development 3:499-503 (1993) present a review of adenovirus-based gene therapy. Bout et al., Human Gene Therapy 5:3-10 (1994) demonstrated the use of adenovirus vectors to transfer genes to the respiratory epithelia of rhesus monkeys. Other instances of the use of adenoviruses in gene therapy can be found in Rosenfeld et al., Science 252:431-434 (1991); Rosenfeld et al., Cell 68:143-155 (1992); Mastrangeli et al., J. Clin. Invest. 91:225-234 (1993); PCT Publication WO94/12649; and Wang, et al., Gene Therapy 2:775-783 (1995). In a preferred embodiment, adenovirus vectors are used.

[0251] Adeno-associated virus (AAV) has also been proposed for use in gene therapy (Walsh et al., Proc. Soc. Exp. Biol. Med. 204:289-300 (1993); U.S. Pat. No. 5,436,146).

[0252] Another approach to gene therapy involves transferring a gene to cells in tissue culture by such methods as electroporation, lipofection, calcium phosphate mediated transfection, or viral infection. Usually, the method of transfer includes the transfer of a selectable marker to the cells. The cells are then placed under selection to isolate those cells that have taken up and are expressing the transferred gene. Those cells are then delivered to a patient.

[0253] In this embodiment, the nucleic acid is introduced into a cell prior to administration in vivo of the resulting recombinant cell. Such introduction can be carried out by any method known in the art, including but not limited to transfection, electroporation, microinjection, infection with a viral or bacteriophage vector containing the nucleic acid sequences, cell fusion, chromosome-mediated gene transfer, microcell-mediated gene transfer, spheroplast fusion, etc. Numerous techniques are known in the art for the introduction of foreign genes into cells (see, e.g., Loeffler and Behr, Meth. Enzymol. 217:599-618 (1993); Cohen et al., Meth. Enzymol. 217:618-644 (1993); Cline, Pharmac. Ther. 29:69-92m (1985) and may be used in accordance with the present invention, provided that the necessary developmental and physiological functions of the recipient cells are not disrupted. The technique should provide for the stable transfer of the nucleic acid to the cell, so that the nucleic acid is expressible by the cell and preferably heritable and expressible by its cell progeny.

[0254] The resulting recombinant cells can be delivered to a patient by various methods known in the art. Recombinant blood cells (e.g., hematopoietic stem or progenitor cells) are preferably administered intravenously. The amount of cells envisioned for use depends on the desired effect, patient state, etc., and can be determined by one skilled in the art.

[0255] Cells into which a nucleic acid can be introduced for purposes of gene therapy encompass any desired, available cell type, and include but are not limited to epithelial cells, endothelial cells, keratinocytes, fibroblasts, muscle cells, hepatocytes; blood cells such as Tlymphocytes, Blymphocytes, monocytes, macrophages, neutrophils, eosinophils, megakaryocytes, granulocytes; various stem or progenitor cells, in particular hematopoietic stem or progenitor cells, e.g., as obtained from bone marrow, umbilical cord blood, peripheral blood, fetal liver, etc.

[0256] In a preferred embodiment, the cell used for gene therapy is autologous to the patient.

[0257] In an embodiment in which recombinant cells are used in gene therapy, nucleic acid sequences encoding an antibody are introduced into the cells such that they are expressible by the cells or their progeny, and the recombinant cells are then administered in vivo for therapeutic effect. In a specific embodiment, stem or progenitor cells are used. Any stem and/or progenitor cells which can be isolated and maintained in vitro can potentially be used in accordance with this embodiment of the present invention (see e.g. PCT Publication WO 94/08598; Stemple and Anderson, Cell 71:973-985 (1992); Rheinwald, Meth. Cell Bio. 21A:229 (1980); and Pittelkow and Scott, Mayo Clinic Proc. 61:771 (1986)).

[0258] In a specific embodiment, the nucleic acid to be introduced for purposes of gene therapy comprises an inducible promoter operably linked to the coding region, such that expression of the nucleic acid is controllable by controlling the presence or absence of the appropriate inducer of transcription. Demonstration of Therapeutic or Prophylactic Activity

[0259] The compounds or pharmaceutical compositions of the invention are preferably tested in vitro, and then in vivo for the desired therapeutic or prophylactic activity, prior to use in humans. For example, in vitro assays to demonstrate the therapeutic or prophylactic utility of a compound or pharmaceutical composition include, the effect of a compound on a cell line or a patient tissue sample. The effect of the compound or composition on the cell line and/or tissue sample can be determined utilizing techniques known to those of skill in the art including, but not limited to, rosette formation assays and cell lysis assays. In accordance with the invention, in vitro assays which can be used to determine whether administration of a specific compound is indicated, include in vitro cell culture assays in which a patient tissue sample is grown in culture, and exposed to or otherwise administered a compound, and the effect of such compound upon the tissue sample is observed.

[0260] Therapeutic/Prophylactic Administration and Composition

[0261] The invention provides methods of treatment, inhibition and prophylaxis by administration to a subject of an effective amount of a compound or pharmaceutical composition of the invention, preferably a polypeptide or antibody of the invention. In a preferred aspect, the compound is substantially purified (e.g., substantially free from substances that limit its effect or produce undesired side-effects). The subject is preferably an animal, including but not limited to animals such as cows, pigs, horses, chickens, cats, dogs, etc., and is preferably a mammal, and most preferably human.

[0262] Formulations and methods of administration that can be employed when the compound comprises a nucleic acid or an immunoglobulin are described above; additional appropriate formulations and routes of administration can be selected from among those described herein below.

[0263] Various delivery systems are known and can be used to administer a compound of the invention, e.g., encapsulation in liposomes, microparticles, microcapsules, recombinant cells capable of expressing the compound, receptor-mediated endocytosis (see, e.g., Wu and Wu, J. Biol. Chem. 262:4429-4432 (1987)), construction of a nucleic acid as part of a retroviral or other vector, etc. Methods of introduction include but are not limited to intradermal, intramuscular, intraperitoneal, intravenous, subcutaneous, intranasal, epidural, and oral routes. The compounds or compositions may be administered by any convenient route, for example by infusion or bolus injection, by absorption through epithelial or mucocutaneous linings (e.g., oral mucosa, rectal and intestinal mucosa, etc.) and may be administered together with other biologically active agents. Administration can be systemic or local. In addition, it may be desirable to introduce the pharmaceutical compounds or compositions of the invention into the central nervous system by any suitable route, including intraventricular and intrathecal injection; intraventricular injection may be facilitated by an intraventricular catheter, for example, attached to a reservoir, such as an Ommaya reservoir. Pulmonary administration can also be employed, e.g., by use of an inhaler or nebulizer, and formulation with an aerosolizing agent.

[0264] In a specific embodiment, it may be desirable to administer the pharmaceutical compounds or compositions of the invention locally to the area in need of treatment; this may be achieved by, for example, and not by way of limitation, local infusion during surgery, topical application, e.g., in conjunction with a wound dressing after surgery, by injection, by means of a catheter, by means of a suppository, or by means of an implant, said implant being of a porous, non-porous, or gelatinous material, including membranes, such as sialastic membranes, or fibers. Preferably, when administering a protein, including an antibody, of the invention, care must be taken to use materials to which the protein does not absorb.

[0265] In another embodiment, the compound or composition can be delivered in a vesicle, in particular a liposome (see Langer, Science 249:1527-1533 (1990); Treat et al., in Liposomes in the Therapy of Infectious Disease and Cancer, Lopez-Berestein and Fidler (eds.), Liss, New York, pp. 353-365 (1989); Lopez-Berestein, ibid., pp. 317-327; see generally ibid.)

[0266] In yet another embodiment, the compound or composition can be delivered in a controlled release system. In one embodiment, a pump may be used (see Langer, supra; Sefton, CRC Crit. Ref. Biomed. Eng. 14:201 (1987); Buchwald et al., Surgery 88:507 (1980); Saudek et al., N. Engl. J. Med. 321:574 (1989)). In another embodiment, polymeric materials can be used (see Medical Applications of Controlled Release, Langer and Wise (eds.), CRC Pres., Boca Raton, Florida (1974); Controlled Drug Bioavailability, Drug Product Design and Performance, Smolen and Ball (eds.), Wiley, New York (1984); Ranger and Peppas, J., Macromol. Sci. Rev. Macromol. Chem. 23:61 (1983); see also Levy et al., Science 228:190 (1985); During et al., Ann. Neurol. 25:351 (1989); Howard et al., J. Neurosurg. 71:105 (1989)). In yet another embodiment, a controlled release system can be placed in proximity of the therapeutic target, i.e., the brain, thus requiring only a fraction of the systemic dose (see, e.g., Goodson, in Medical Applications of Controlled Release, supra, vol. 2, pp. 115-138 (1984)).

[0267] Other controlled release systems are discussed in the review by Langer (Science 249:1527-1533 (1990)).

[0268] In a specific embodiment where the compound of the invention is a nucleic acid encoding a protein, the nucleic acid can be administered in vivo to promote expression of its encoded protein, by constructing it as part of an appropriate nucleic acid expression vector and administering it so that it becomes intracellular, e.g., by use of a retroviral vector (see U.S. Pat. No. 4,980,286), or by direct injection, or by use of microparticle bombardment (e.g., a gene gun; Biolistic, Dupont), or coating with lipids or cell-surface receptors or transfecting agents, or by administering it in linkage to a homeobox-like peptide which is known to enter the nucleus (see e.g., Joliot et al., Proc. Natl. Acad. Sci. USA 88:1864-1868 (1991)), etc. Alternatively, a nucleic acid can be introduced intracellularly and incorporated within host cell DNA for expression, by homologous recombination.

[0269] The present invention also provides pharmaceutical compositions. Such compositions comprise a therapeutically effective amount of a compound, and a pharmaceutically acceptable carrier. In a specific embodiment, the term “pharmaceutically acceptable” means approved by a regulatory agency of the Federal or a state government or listed in the U.S. Pharmacopeia or other generally recognized pharmacopeia for use in animals, and more particularly in humans. The term “carrier” refers to a diluent, adjuvant, excipient, or vehicle with which the therapeutic is administered. Such pharmaceutical carriers can be sterile liquids, such as water and oils, including those of petroleum, animal, vegetable or synthetic origin, such as peanut oil, soybean oil, mineral oil, sesame oil and the like. Water is a preferred carrier when the pharmaceutical composition is administered intravenously. Saline solutions and aqueous dextrose and glycerol solutions can also be employed as liquid carriers, particularly for injectable solutions. Suitable pharmaceutical excipients include starch, glucose, lactose, sucrose, gelatin, malt, rice, flour, chalk, silica gel, sodium stearate, glycerol monostearate, talc, sodium chloride, dried skim milk, glycerol, propylene, glycol, water, ethanol and the like. The composition, if desired, can also contain minor amounts of wetting or emulsifying agents, or pH buffering agents. These compositions can take the form of solutions, suspensions, emulsion, tablets, pills, capsules, powders, sustained-release formulations and the like. The composition can be formulated as a suppository, with traditional binders and carriers such as triglycerides. Oral formulation can include standard carriers such as pharmaceutical grades of mannitol, lactose, starch, magnesium stearate, sodium saccharine, cellulose, magnesium carbonate, etc. Examples of suitable pharmaceutical carriers are described in “Remington's Pharmaceutical Sciences” by E. W. Martin. Such compositions will contain a therapeutically effective amount of the compound, preferably in purified form, together with a suitable amount of carrier so as to provide the form for proper administration to the patient. The formulation should suit the mode of administration.

[0270] In a preferred embodiment, the composition is formulated in accordance with routine procedures as a pharmaceutical composition adapted for intravenous administration to human beings. Typically, compositions for intravenous administration are solutions in sterile isotonic aqueous buffer. Where necessary, the composition may also include a solubilizing agent and a local anesthetic such as lignocaine to ease pain at the site of the injection. Generally, the ingredients are supplied either separately or mixed together in unit dosage form, for example, as a dry lyophilized powder or water free concentrate in a hermetically sealed container such as an ampoule or sachette indicating the quantity of active agent. Where the composition is to be administered by infusion, it can be dispensed with an infusion bottle containing sterile pharmaceutical grade water or saline. Where the composition is administered by injection, an ampoule of sterile water for injection or saline can be provided so that the ingredients may be mixed prior to administration.

[0271] The compounds of the invention can be formulated as neutral or salt forms. Pharmaceutically acceptable salts include those formed with anions such as those derived from hydrochloric, phosphoric, acetic, oxalic, tartaric acids, etc., and those formed with cations such as those derived from sodium, potassium, ammonium, calcium, ferric hydroxides, isopropylamine, triethylamine, 2-ethylamino ethanol, histidine, procaine, etc.

[0272] The amount of the compound of the invention which will be effective in the treatment, inhibition and prevention of a disease or disorder associated with aberrant expression and/or activity of a polypeptide of the invention can be determined by standard clinical techniques. In addition, in vitro assays may optionally be employed to help identify optimal dosage ranges. The precise dose to be employed in the formulation will also depend on the route of administration, and the seriousness of the disease or disorder, and should be decided according to the judgment of the practitioner and each patient's circumstances. Effective doses may be extrapolated from dose-response curves derived from in vitro or animal model test systems.

[0273] For antibodies, the dosage administered to a patient is typically 0.1 mg/kg to 100 mg/kg of the patient's body weight. Preferably, the dosage administered to a patient is between 0.1 mg/kg and 20 mg/kg of the patient's body weight, more preferably 1 mg/kg to 10 mg/kg of the patient's body weight. Generally, human antibodies have a longer half-life within the human body than antibodies from other species due to the immune response to the foreign polypeptides. Thus, lower dosages of human antibodies and less frequent administration is often possible. Further, the dosage and frequency of administration of antibodies of the invention may be reduced by enhancing uptake and tissue penetration (e.g., into the brain) of the antibodies by modifications such as, for example, lipidation.

[0274] The invention also provides a pharmaceutical pack or kit comprising one or more containers filled with one or more of the ingredients of the pharmaceutical compositions of the invention. Optionally associated with such container(s) can be a notice in the form prescribed by a governmental agency regulating the manufacture, use or sale of pharmaceuticals or biological products, which notice reflects approval by the agency of manufacture, use or sale for human administration.

[0275] Diagnosis and Imaging

[0276] Labeled antibodies, and derivatives and analogs thereof, which specifically bind to a polypeptide of interest can be used for diagnostic purposes to detect, diagnose, or monitor diseases, disorders, and/or conditions associated with the aberrant expression and/or activity of a polypeptide of the invention. The invention provides for the detection of aberrant expression of a polypeptide of interest, comprising (a) assaying the expression of the polypeptide of interest in cells or body fluid of an individual using one or more antibodies specific to the polypeptide interest and (b) comparing the level of gene expression with a standard gene expression level, whereby an increase or decrease in the assayed polypeptide gene expression level compared to the standard expression level is indicative of aberrant expression.

[0277] The invention provides a diagnostic assay for diagnosing a disorder, comprising (a) assaying the expression of the polypeptide of interest in cells or body fluid of an individual using one or more antibodies specific to the polypeptide interest and (b) comparing the level of gene expression with a standard gene expression level, whereby an increase or decrease in the assayed polypeptide gene expression level compared to the standard expression level is indicative of a particular disorder. With respect to cancer, the presence of a relatively high amount of transcript in biopsied tissue from an individual may indicate a predisposition for the development of the disease, or may provide a means for detecting the disease prior to the appearance of actual clinical symptoms. A more definitive diagnosis of this type may allow health professionals to employ preventative measures or aggressive treatment earlier thereby preventing the development or further progression of the cancer.

[0278] Antibodies of the invention can be used to assay protein levels in a biological sample using classical immunohistological methods known to those of skill in the art (e.g., see Jalkanen, et al., J. Cell. Biol. 101:976-985 (1985); Jalkanen, et al., J. Cell. Biol. 105:3087-3096 (1987)). Other antibody-based methods useful for detecting protein gene expression include immunoassays, such as the enzyme linked immunosorbent assay (ELISA) and the radioimmunoassay (RIA). Suitable antibody assay labels are known in the art and include enzyme labels, such as, glucose oxidase; radioisotopes, such as iodine (1251, 121I), carbon (14C), sulfur (35S), tritium (3H), indium (112In), and technetium (99Tc); luminescent labels, such as luminol; and fluorescent labels, such as fluorescein and rhodamine, and biotin.

[0279] One aspect of the invention is the detection and diagnosis of a disease or disorder associated with aberrant expression of a polypeptide of interest in an animal, preferably a mammal and most preferably a human. In one embodiment, diagnosis comprises: a) administering (for example, parenterally, subcutaneously, or intraperitoneally) to a subject an effective amount of a labeled molecule which specifically binds to the polypeptide of interest; b) waiting for a time interval following the administering for permitting the labeled molecule to preferentially concentrate at sites in the subject where the polypeptide is expressed (and for unbound labeled molecule to be cleared to background level); c) determining background level; and d) detecting the labeled molecule in the subject, such that detection of labeled molecule above the background level indicates that the subject has a particular disease or disorder associated with aberrant expression of the polypeptide of interest. Background level can be determined by various methods including, comparing the amount of labeled molecule detected to a standard value previously determined for a particular system.

[0280] It will be understood in the art that the size of the subject and the imaging system used will determine the quantity of imaging moiety needed to produce diagnostic images. In the case of a radioisotope moiety, for a human subject, the quantity of radioactivity injected will normally range from about 5 to 20 millicuries of 99mTc. The labeled antibody or antibody fragment will then preferentially accumulate at the location of cells which contain the specific protein. In vivo tumor imaging is described in S. W. Burchiel et al., “Immunopharmacokinetics of Radiolabeled Antibodies and Their Fragments.” (Chapter 13 in Tumor Imaging: The Radiochemical Detection of Cancer, S. W. Burchiel and B. A. Rhodes, eds., Masson Publishing Inc. (1982).

[0281] Depending on several variables, including the type of label used and the mode of administration, the time interval following the administration for permitting the labeled molecule to preferentially concentrate at sites in the subject and for unbound labeled molecule to be cleared to background level is 6 to 48 hours or 6 to 24 hours or 6 to 12 hours. In another embodiment the time interval following administration is 5 to 20 days or 5 to 10 days.

[0282] In an embodiment, monitoring of the disease or disorder is carried out by repeating the method for diagnosing the disease or disease, for example, one month after initial diagnosis, six months after initial diagnosis, one year after initial diagnosis, etc.

[0283] Presence of the labeled molecule can be detected in the patient using methods known in the art for in vivo scanning. These methods depend upon the type of label used. Skilled artisans will be able to determine the appropriate method for detecting a particular label. Methods and devices that may be used in the diagnostic methods of the invention include, but are not limited to, computed tomography (CT), whole body scan such as position emission tomography (PET), magnetic resonance imaging (MRI), and sonography.

[0284] In a specific embodiment, the molecule is labeled with a radioisotope and is detected in the patient using a radiation responsive surgical instrument (Thurston et al., U.S. Pat. No. 5,441,050). In another embodiment, the molecule is labeled with a fluorescent compound and is detected in the patient using a fluorescence responsive scanning instrument. In another embodiment, the molecule is labeled with a positron emitting metal and is detected in the patent using positron emission-tomography. In yet another embodiment, the molecule is labeled with a paramagnetic label and is detected in a patient using magnetic resonance imaging (MRI).

[0285] Kits

[0286] The present invention provides kits that can be used in the above methods. In one embodiment, a kit comprises an antibody of the invention, preferably a purified antibody, in one or more containers. In a specific embodiment, the kits of the present invention contain a substantially isolated polypeptide comprising an epitope which is specifically immunoreactive with an antibody included in the kit. Preferably, the kits of the present invention further comprise a control antibody which does not react with the polypeptide of interest. In another specific embodiment, the kits of the present invention contain a means for detecting the binding of an antibody to a polypeptide of interest (e.g., the antibody may be conjugated to a detectable substrate such as a fluorescent compound, an enzymatic substrate, a radioactive compound or a luminescent compound, or a second antibody which recognizes the first antibody may be conjugated to a detectable substrate).

[0287] In another specific embodiment of the present invention, the kit is a diagnostic kit for use in screening serum containing antibodies specific against proliferative and/or cancerous polynucleotides and polypeptides. Such a kit may include a control antibody that does not react with the polypeptide of interest. Such a kit may include a substantially isolated polypeptide antigen comprising an epitope which is specifically immunoreactive with at least one anti-polypeptide antigen antibody. Further, such a kit includes means for detecting the binding of said antibody to the antigen (e.g., the antibody may be conjugated to a fluorescent compound such as fluorescein or rhodamine which can be detected by flow cytometry). In specific embodiments, the kit may include a recombinantly produced or chemically synthesized polypeptide antigen. The polypeptide antigen of the kit may also be attached to a solid support.

[0288] In a more specific embodiment the detecting means of the above-described kit includes a solid support to which said polypeptide antigen is attached. Such a kit may also include a non-attached reporter-labeled anti-human antibody. In this embodiment, binding of the antibody to the polypeptide antigen can be detected by binding of the said reporter-labeled antibody.

[0289] In an additional embodiment, the invention includes a diagnostic kit for use in screening serum containing antigens of the polypeptide of the invention. The diagnostic kit includes a substantially isolated antibody specifically immunoreactive with polypeptide or polynucleotide antigens, and means for detecting the binding of the polynucleotide or polypeptide antigen to the antibody. In one embodiment, the antibody is attached to a solid support. In a specific embodiment, the antibody may be a monoclonal antibody. The detecting means of the kit may include a second, labeled monoclonal antibody. Alternatively, or in addition, the detecting means may include a labeled, competing antigen.

[0290] In one diagnostic configuration, test serum is reacted with a solid phase reagent having a surface-bound antigen obtained by the methods of the present invention. After binding with specific antigen antibody to the reagent and removing unbound serum components by washing, the reagent is reacted with reporter-labeled anti-human antibody to bind reporter to the reagent in proportion to the amount of bound anti-antigen antibody on the solid support. The reagent is again washed to remove unbound labeled antibody, and the amount of reporter associated with the reagent is determined. Typically, the reporter is an enzyme which is detected by incubating the solid phase in the presence of a suitable fluorometric, luminescent or colorimetric substrate (Sigma, St. Louis, Mo.).

[0291] The solid surface reagent in the above assay is prepared by known techniques for attaching protein material to solid support material, such as polymeric beads, dip sticks, 96-well plate or filter material. These attachment methods generally include non-specific adsorption of the protein to the support or covalent attachment of the protein, typically through a free amine group, to a chemically reactive group on the solid support, such as an activated carboxyl, hydroxyl, or aldehyde group. Alternatively, streptavidin coated plates can be used in conjunction with biotinylated antigen(s).

[0292] Thus, the invention provides an assay system or kit for carrying out this diagnostic method. The kit generally includes a support with surface-bound recombinant antigens, and a reporter-labeled anti-human antibody for detecting surface-bound anti-antigen antibody.

[0293] Uses of the Polynucleotides

[0294] Each of the polynucleotides identified herein can be used in numerous ways as reagents. The following description should be considered exemplary and utilizes known techniques.

[0295] The ovarian and/or breast antigen polynucleotides of the present invention are useful for chromosome identification. There exists an ongoing need to identify new chromosome markers, since few chromosome marking reagents, based on actual sequence data (repeat polymorphisms), are presently available. Each sequence is specifically targeted to and can hybridize with a particular location on an individual human chromosome, thus each polynucleotide of the present invention can routinely be used as a chromosome marker using techniques known in the art.

[0296] Briefly, sequences can be mapped to chromosomes by preparing PCR primers (preferably at least 15 bp (e.g., 15-25 bp) from the sequences shown in SEQ ID NO:X, or the complement thereto. Primers can optionally be selected using computer analysis so that primers do not span more than one predicted exon in the genomic DNA. These primers are then used for PCR screening of somatic cell hybrids containing individual human chromosomes. Only those hybrids containing the human gene corresponding to SEQ ID NO:X will yield an amplified fragment.

[0297] Similarly, somatic hybrids provide a rapid method of PCR mapping the polynucleotides to particular chromosomes. Three or more clones can be assigned per day using a single thermal cycler. Moreover, sublocalization of the polynucleotides can be achieved with panels of specific chromosome fragments. Other gene mapping strategies that can be used include in situ hybridization, prescreening with labeled flow-sorted chromosomes, preselection by hybridization to construct chromosome specific-cDNA libraries, and computer mapping techniques (See, e.g., Shuler, Trends Biotechnol 16:456-459 (1998) which is hereby incorporated by reference in its entirety).

[0298] Precise chromosomal location of the polynucleotides can also be achieved using fluorescence in situ hybridization (FISH) of a metaphase chromosomal spread. This technique uses polynucleotides as short as 500 or 600 bases; however, polynucleotides 2,000-4,000 bp are preferred. For a review of this technique, see Verma et al., “Human Chromosomes: a Manual of Basic Techniques,” Pergamon Press, New York (1988).

[0299] For chromosome mapping, the polynucleotides can be used individually (to mark a single chromosome or a single site on that chromosome) or in panels (for marking multiple sites and/or multiple chromosomes).

[0300] Thus, the present invention also provides a method for chromosomal localization which involves (a) preparing PCR primers from the polynucleotide sequences in Table 3 and SEQ ID NO:X and (b) screening somatic cell hybrids containing individual chromosomes.

[0301] The polynucleotides of the present invention would likewise be useful for radiation hybrid mapping, HAPPY mapping, and long range restriction mapping. For a review of these techniques and others known in the art, see, e.g. Dear, “Genome Mapping: A Practical Approach,” IRL Press at Oxford University Press, London (1997); Aydin, J. Mol. Med. 77:691-694 (1999); Hacia et al., Mol. Psychiatry 3:483-492 (1998); Herrick et al., Chromosome Res. 7:409-423 (1999); Hamilton et al., Methods Cell Biol. 62:265-280 (2000); and/or Ott, J. Hered. 90:68-70 (1999) each of which is hereby incorporated by reference in its entirety.

[0302] Once a polynucleotide has been mapped to a precise chromosomal location, the physical position of the polynucleotide can be used in linkage analysis. Linkage analysis establishes coinheritance between a chromosomal location and presentation of a particular disease. (Disease mapping data are found, for example, in V. McKusick, Mendelian Inheritance in Man (available on line through Johns Hopkins University Welch Medical Library).) Assuming 1 megabase mapping resolution and one gene per 20 kb, a cDNA precisely localized to a chromosomal region associated with the disease could be one of 50-500 potential causative genes.

[0303] Thus, once coinheritance is established, differences in a polynucleotide of the invention and the corresponding gene between affected and unaffected individuals can be examined. First, visible structural alterations in the chromosomes, such as deletions or translocations, are examined in chromosome spreads or by PCR. If no structural alterations exist, the presence of point mutations are ascertained. Mutations observed in some or all affected individuals, but not in normal individuals, indicates that the mutation may cause the disease. However, complete sequencing of the polypeptide and the corresponding gene from several normal individuals is required to distinguish the mutation from a polymorphism. If a new polymorphism is identified, this polymorphic polypeptide can be used for further linkage analysis.

[0304] Furthermore, increased or decreased expression of the gene in affected individuals as compared to unaffected individuals can be assessed using the polynucleotides of the invention. Any of these alterations (altered expression, chromosomal rearrangement, or mutation) can be used as a diagnostic or prognostic marker.

[0305] Thus, the invention provides a method of detecting increased or decreased expression levels of the breast, ovarian, breast cancer and/or ovarian cancer polynucleotides in affected individuals as compared to unaffected individuals using polynucleotides of the present invention and techniques known in the art, including but not limited to the method described in Example 11. Any of these alterations (altered expression, chromosomal rearrangement, or mutation) can be used as a diagnostic or prognostic marker.

[0306] Thus, the invention also provides a diagnostic method useful during diagnosis of a disorder related to the female reproductive system, particularly a disorder related to the breast and/or ovary, including breast cancer and/or ovarian cancer, involving measuring the expression level of ovarian and/or breast antigen polynucleotides in breast and/or ovarian tissue or other cells or body fluid from an individual and comparing the measured gene expression level with a standard breast, ovarian, breast cancer and/or ovarian cancer polynucleotide expression level, whereby an increase or decrease in the gene expression level compared to the standard is indicative of a disorder related to the female reproductive system, particularly a disorder related to the breast and/or ovary, including breast cancer and/or ovarian cancer.

[0307] In still another embodiment, the invention includes a kit for analyzing samples for the presence of proliferative and/or cancerous polynucleotides derived from a test subject. In a general embodiment, the kit includes at least one polynucleotide probe containing a nucleotide sequence that will specifically hybridize with a polynucleotide of the invention and a suitable container. In a specific embodiment, the kit includes two polynucleotide probes defining an internal region of the polynucleotide of the invention, where each probe has one strand containing a 31′mer-end internal to the region. In a further embodiment, the probes may be useful as primers for polymerase chain reaction amplification.

[0308] Where a diagnosis of a a disorder related to the female reproductive system, particularly a disorder related to the breast and/or ovary, including, for example, diagnosis of a tumor, has already been made according to conventional methods, the present invention is useful as a prognostic indicator, whereby patients exhibiting enhanced or depressed breast, ovarian, breast cancer and/or ovarian cancer polynucleotide expression will experience a worse clinical outcome relative to patients expressing the gene at a level nearer the standard level.

[0309] By “measuring the expression level of breast, ovarian, breast cancer and/or ovarian cancer polynucleotides” is intended qualitatively or quantitatively measuring or estimating the level of the breast, ovarian, breast cancer and/or ovarian cancer polypeptide or the level of the mRNA encoding the breast, ovarian, breast cancer and/or ovarian cancer polypeptide in a first biological sample either directly (e.g., by determining or estimating absolute protein level or mRNA level) or relatively (e.g., by comparing to the breast, ovarian, breast cancer and/or ovarian cancer polypeptide level or mRNA level in a second biological sample). Preferably, the breast, ovarian, breast cancer and/or ovarian cancer polypeptide level or mRNA level in the first biological sample is measured or estimated and compared to a standard breast, ovarian, breast cancer and/or ovarian cancer polypeptide level or mRNA level, the standard being taken from a second biological sample obtained from an individual not having the female reproductive system related disorder or being determined by averaging levels from a population of individuals not having a female reproductive system related disorder. As will be appreciated in the art, once a standard breast, ovarian, breast cancer and/or ovarian cancer polypeptide level or mRNA level is known, it can be used repeatedly as a standard for comparison.

[0310] By “biological sample” is intended any biological sample obtained from an individual, body fluid, cell line, tissue culture, or other source which contains breast, ovarian, breast cancer and/or ovarian cancer polypeptide or the corresponding mRNA. As indicated, biological samples include body fluids (such as vaginal pool, breast milk, lymph, sera, plasma, urine, semen, synovial fluid and spinal fluid) which contain the breast, ovarian, breast cancer and/or ovarian cancer polypeptide, breast and/or ovarian tissue, and other tissue sources found to express the breast, ovarian, breast cancer and/or ovarian cancer polypeptide. Methods for obtaining tissue biopsies and body fluids from mammals are well known in the art. Where the biological sample is to include mRNA, a tissue biopsy is the preferred source.

[0311] The method(s) provided above may preferrably be applied in a diagnostic method and/or kits in which polynucleotides and/or polypeptides of the invention are attached to a solid support. In one exemplary method, the support may be a “gene chip” or a “biological chip” as described in U.S. Pat. No. 5,837,832, 5,874,219, and 5,856,174. Further, such a gene chip with breast, ovarian, breast cancer and/or ovarian cancer polynucleotides attached may be used to identify polymorphisms between the breast, ovarian, breast cancer and/or ovarian cancer polynucleotide sequences, with polynucleotides isolated from a test subject. The knowledge of such polymorphisms (i.e. their location, as well as, their existence) would be beneficial in identifying disease loci for many disorders, such as for example, in neural disorders, immune system disorders, muscular disorders, reproductive disorders, gastrointestinal disorders, pulmonary disorders, cardiovascular disorders, renal disorders, proliferative disorders, and/or cancerous diseases and conditions, though most preferably in breast and/or ovarian related proliferative, and/or cancerous diseases and conditions. Such a method is described in U.S. Pat. Nos. 5,858,659 and 5,856,104. The US patents referenced supra are hereby incorporated by reference in their entirety herein.

[0312] The present invention encompasses breast, ovarian, breast cancer and/or ovarian cancer polynucleotides that are chemically synthesized, or reproduced as peptide nucleic acids (PNA), or according to other methods known in the art. The use of PNAs would serve as the preferred form if the polynucleotides of the invention are incorporated onto a solid support, or gene chip. For the purposes of the present invention, a peptide nucleic acid (PNA) is a polyamide type of DNA analog and the monomeric units for adenine, guanine, thymine and cytosine are available commercially (Perceptive Biosystems). Certain components of DNA, such as phosphorus, phosphorus oxides, or deoxyribose derivatives, are not present in PNAs. As disclosed by P. E. Nielsen, M. Egholm, R. H. Berg and 0. Buchardt, Science 254, 1497 (1991); and M. Egholm, 0. Buchardt, L. Christensen, C. Behrens, S. M. Freier, D. A. Driver, R. H. Berg, S. K. Kim, B. Norden, and P. E. Nielsen, Nature 365, 666 (1993), PNAs bind specifically and tightly to complementary DNA strands and are not degraded by nucleases. In fact, PNA binds more strongly to DNA than DNA itself does. This is probably because there is no electrostatic repulsion between the two strands, and also the polyamide backbone is more flexible. Because of this, PNA/DNA duplexes bind under a wider range of stringency conditions than DNA/DNA duplexes, making it easier to perform multiplex hybridization. Smaller probes can be used than with DNA due to the strong binding. In addition, it is more likely that single base mismatches can be determined with PNA/DNA hybridization because a single mismatch in a PNA/DNA 15-mer lowers the melting point (T.sub.m) by 8°-20° C., vs. 4°-16° C. for the DNA/DNA 15-mer duplex. Also, the absence of charge groups in PNA means that hybridization can be done at low ionic strengths and reduce possible interference by salt during the analysis.

[0313] The present invention have uses which include, but are not limited to, detecting cancer in mammals. In particular the invention is useful during diagnosis of pathological cell proliferative neoplasias which include, but are not limited to: acute myelogenous leukemias including acute monocytic leukemia, acute myeloblastic leukemia, acute promyelocytic leukemia, acute myelomonocytic leukemia, acute erythroleukemia, acute megakaryocytic leukemia, and acute undifferentiated leukemia, etc.; and chronic myelogenous leukemias including chronic myelomonocytic leukemia, chronic granulocytic leukemia, etc. Preferred mammals include monkeys, apes, cats, dogs, cows, pigs, horses, rabbits and humans. Particularly preferred are humans.

[0314] Pathological cell proliferative disorders are often associated with inappropriate activation of proto-oncogenes. (Gelmann, E. P. et al., “The Etiology of Acute Leukemia: Molecular Genetics and Viral Oncology,” in Neoplastic Diseases of the Blood, Vol 1., Wiernik, P. H. et al. eds., 161-182 (1985)). Neoplasias are now believed to result from the qualitative alteration of a normal cellular gene product, or from the quantitative modification of gene expression by insertion into the chromosome of a viral sequence, by chromosomal translocation of a gene to a more actively transcribed region, or by some other mechanism. (Gelmann et al., supra) It is likely that mutated or altered expression of specific genes is involved in the pathogenesis of some leukemias, among other tissues and cell types. (Gelmann et al., supra) Indeed, the human counterparts of the oncogenes involved in some animal neoplasias have been amplified or translocated in some cases of human leukemia and carcinoma. (Gelmann et al., supra)

[0315] For example, c-myc expression is highly amplified in the non-lymphocytic leukemia cell line HL-60. When HL-60 cells are chemically induced to stop proliferation, the level of c-myc is found to be downregulated. (International Publication Number WO 91/15580). However, it has been shown that exposure of HL-60 cells to a DNA construct that is complementary to the 5′ end of c-myc or c-myb blocks translation of the corresponding mRNAs which downregulates expression of the c-myc or c-myb proteins and causes arrest of cell proliferation and differentiation of the treated cells. (International Publication Number WO 91/15580; Wickstrom et al., Proc. Natl. Acad. Sci. 85:1028 (1988); Anfossi et al., Proc. Natl. Acad. Sci. 86:3379 (1989)). However, the skilled artisan would appreciate the present invention's usefulness is not limited to treatment of proliferative disorders of hematopoietic cells and tissues, in light of the numerous cells and cell types of varying origins which are known to exhibit proliferative phenotypes.

[0316] In addition to the foregoing, a ovarian and/or breast antigen polynucleotide can be used to control gene expression through triple helix formation or through antisense DNA or RNA. Antisense techniques are discussed, for example, in Okano, J. Neurochem. 56: 560 (1991); “Oligodeoxynucleotides as Antisense Inhibitors of Gene Expression, CRC Press, Boca Raton, Fla. (1988). Triple helix formation is discussed in, for instance Lee et al., Nucleic Acids Research 6: 3073 (1979); Cooney et al., Science 241: 456 (1988); and Dervan et al., Science 251: 1360 (1991). Both methods rely on binding of the polynucleotide to a complementary DNA or RNA. For these techniques, preferred polynucleotides are usually oligonucleotides 20 to 40 bases in length and complementary to either the region of the gene involved in transcription (triple helix—see Lee et al., Nucl. Acids Res. 6:3073 (1979); Cooney et al., Science 241:456 (1988); and Dervan et al., Science 251:1360 (1991) ) or to the mRNA itself (antisense—Okano, J. Neurochem. 56:560 (1991); Oligodeoxy-nucleotides as Antisense Inhibitors of Gene Expression, CRC Press, Boca Raton, Fla. (1988).) Triple helix formation optimally results in a shut-off of RNA transcription from DNA, while antisense RNA hybridization blocks translation of an mRNA molecule into polypeptide. The oligonucleotide described above can also be delivered to cells such that the antisense RNA or DNA may be expressed in vivo to inhibit production of polypeptide of the present invention antigens. Both techniques are effective in model systems, and the information disclosed herein can be used to design antisense or triple helix polynucleotides in an effort to treat disease, and in particular, for the treatment of proliferative diseases and/or conditions.

[0317] Polynucleotides of the present invention are also useful in gene therapy. One goal of gene therapy is to insert a normal gene into an organism having a defective gene, in an effort to correct the genetic defect. The polynucleotides disclosed in the present invention offer a means of targeting such genetic defects in a highly accurate manner. Another goal is to insert a new gene that was not present in the host genome, thereby producing a new trait in the host cell.

[0318] The polynucleotides are also useful for identifying individuals from minute biological samples. The United States military, for example, is considering the use of restriction fragment length polymorphism (RFLP) for identification of its personnel. In this technique, an individual's genomic DNA is digested with one or more restriction enzymes, and probed on a Southern blot to yield unique bands for identifying personnel. This method does not suffer from the current limitations of “Dog Tags” which can be lost, switched, or stolen, making positive identification difficult. The polynucleotides of the present invention can be used as additional DNA markers for RFLP.

[0319] The polynucleotides of the present invention can also be used as an alternative to RFLP, by determining the actual base-by-base DNA sequence of selected portions of an individual's genome. These sequences can be used to prepare PCR primers for amplifying and isolating such selected DNA, which can then be sequenced. Using this technique, individuals can be identified because each individual will have a unique set of DNA sequences. Once an unique ID database is established for an individual, positive identification of that individual, living or dead, can be made from extremely small tissue samples.

[0320] Forensic biology also benefits from using DNA-based identification techniques as disclosed herein. DNA sequences taken from very small biological samples such as tissues, e.g., hair or skin, or body fluids, e.g., blood, saliva, semen, synovial fluid, amniotic fluid, breast milk, lymph, pulmonary sputum or surfactant, urine, fecal matter, etc., can be amplified using PCR. In one prior art technique, gene sequences amplified from polymorphic loci, such as DQa class II HLA gene, are used in forensic biology to identify individuals. (Erlich, H., PCR Technology, Freeman and Co. (1992).) Once these specific polymorphic loci are amplified, they are digested with one or more restriction enzymes, yielding an identifying set of bands on a Southern blot probed with DNA corresponding to the DQa class II HLA gene. Similarly, polynucleotides of the present invention can be used as polymorphic markers for forensic purposes.

[0321] There is also a need for reagents capable of identifying the source of a particular tissue. Such need arises, for example, in forensics when presented with tissue of unknown origin. Appropriate reagents can comprise, for example, DNA probes or primers specific to breast, ovarian, breast cancer and/or ovarian cancer polynucleotides prepared from the sequences of the present invention. Panels of such reagents can identify tissue by species and/or by organ type. In a similar fashion, these reagents can be used to screen tissue cultures for contamination.

[0322] The polynucleotides of the present invention are also useful as hybridization probes for differential identification of the tissue(s) or cell type(s) present in a biological sample. Similarly, polypeptides and antibodies directed to polypeptides of the present invention are useful to provide immunological probes for differential identification of the tissue(s) (e.g., immunohistochemistry assays) or cell type(s) (e.g., immunocytochemistry assays). In addition, for a number of disorders of the above tissues or cells, significantly higher or lower levels of gene expression of the polynucleotides/polypeptides of the present invention may be detected in certain tissues (e.g., tissues expressing polypeptides and/or polynucleotides of the present invention, breast, ovarian, breast cancer and/or ovarian cancer tissues and/or cancerous and/or wounded tissues) or bodily fluids (e.g., vaginal pool, breast milk, serum, plasma, urine, synovial fluid or spinal fluid) taken from an individual having such a disorder, relative to a “standard” gene expression level, i.e., the expression level in healthy tissue from an individual not having the disorder.

[0323] Thus, the invention provides a diagnostic method of a disorder, which involves: (a) assaying gene expression level in cells or body fluid of an individual; (b) comparing the gene expression level with a standard gene expression level, whereby an increase or decrease in the assayed gene expression level compared to the standard expression level is indicative of a disorder.

[0324] In the very least, the polynucleotides of the present invention can be used as molecular weight markers on Southern gels, as diagnostic probes for the presence of a specific mRNA in a particular cell type, as a probe to “subtract-out” known sequences in the process of discovering novel polynucleotides, for selecting and making oligomers for attachment to a “gene chip” or other support, to raise anti-DNA antibodies using DNA immunization techniques, and as an antigen to elicit an immune response.

[0325] Uses of the Polypeptides

[0326] Each of the polypeptides identified herein can be used in numerous ways. The following description should be considered exemplary and utilizes known techniques.

[0327] Polypeptides and antibodies directed to polypeptides of the present invention are useful to provide immunological probes for differential identification of the tissue(s) (e.g., immunohistochemistry assays such as, for example, ABC immunoperoxidase (Hsu et al., J. Histochem. Cytochem. 29:577-580 (1981)) or cell type(s) (e.g., immunocytochemistry assays).

[0328] Antibodies can be used to assay levels of polypeptides encoded by polynucleotides of the invention in a biological sample using classical immunohistological methods known to those of skill in the art (e.g., see Jalkanen, et al., J. Cell. Biol. 101:976-985 (1985); Jalkanen, et al., J. Cell. Biol. 105:3087-3096 (1987)). Other antibody-based methods useful for detecting protein gene expression include immunoassays, such as the enzyme linked immunosorbent assay (ELISA) and the radioimmunoassay (RIA). Suitable antibody assay labels are known in the art and include enzyme labels, such as, glucose oxidase; radioisotopes, such as iodine (¹³¹I, ¹²⁵I, ¹²³I, ¹²³I), carbon (¹⁴C), sulfur (35S), tritium (³H), indium (^{115m}In, ^{113m}In, ¹¹²In, ¹¹¹In), and technetium (⁹⁹Tc, ^{99m}Tc), thallium (²⁰¹Ti), gallium (⁶⁸Ga, ⁶⁷Ga), palladium (103Pd), molybdenum (⁹⁹Mo), xenon (¹³³Xe), fluorine (¹⁸F), ¹⁵³Sm, ¹⁷⁷Lu, ¹⁵⁹Gd, 149Pm, ¹⁴⁰La, ¹⁷⁵Yb, 166Ho, ⁹⁰y, ⁴⁷Sc, 186Re, ¹⁸⁸Re, ¹⁴²Pr, ¹⁰⁵Rh, ⁹⁷Ru; luminescent labels, such as luminol; and fluorescent labels, such as fluorescein and rhodamine, and biotin.

[0329] In addition to assaying levels of polypeptide of the present invention in a biological sample, proteins can also be detected in vivo by imaging. Antibody labels or markers for in vivo imaging of protein include those detectable by X-radiography, NMR or ESR. For X-radiography, suitable labels include radioisotopes such as barium or cesium, which emit detectable radiation but are not overtly harmful to the subject. Suitable markers for NMR and ESR include those with a detectable characteristic spin, such as deuterium, which may be incorporated into the antibody by labeling of nutrients for the relevant hybridoma.

[0330] A protein-specific antibody or antibody fragment which has been labeled with an appropriate detectable imaging moiety, such as a radioisotope (for example, ¹³¹I, ¹¹²In, ^{99m}Tc, (¹³¹I, ¹²⁵I, ¹²³I, 121I), carbon (¹⁴C), sulfur (³⁵S), tritium (³H), indium (^{115m}In, ^{113m}In, ¹¹²In, ¹¹¹In), and technetium (99Tc, ^{99m}Tc), thallium (²⁰¹Ti), gallium (⁶⁸Ga, ⁶⁷Ga), palladium (¹⁰³Pd), molybdenum (⁹⁹Mo), xenon (133Xe), fluorine (¹⁸F, ¹⁵³Sm, ¹⁷⁷Lu, 159Gd, 149Pm, ¹⁴⁰La, ¹⁷⁵Yb, 166Ho, ⁹⁰Y, ⁴⁷Sc, ¹⁸⁶Re, ¹⁸⁸Re, ¹⁴²Pr, ¹⁰⁵Rh, ⁹⁷Ru), a radio-opaque substance, or a material detectable by nuclear magnetic resonance, is introduced (for example, parenterally, subcutaneously or intraperitoneally) into the mammal to be examined for immune system disorder. It will be understood in the art that the size of the subject and the imaging system used will determine the quantity of imaging moiety needed to produce diagnostic images. In the case of a radioisotope moiety, for a human subject, the quantity of radioactivity injected will normally range from about 5 to 20 millicuries of ^{99m}Tc. The labeled antibody or antibody fragment will then preferentially accumulate at the location of cells which express the polypeptide encoded by a polynucleotide of the invention. In vivo tumor imaging is described in S. W. Burchiel et al., “Immunopharmacokinetics of Radiolabeled Antibodies and Their Fragments” (Chapter 13 in Tumor Imaging: The Radiochemical Detection of Cancer, S. W. Burchiel and B. A. Rhodes, eds., Masson Publishing Inc. (1982)).

[0331] In one embodiment, the invention provides a method for the specific delivery of compositions of the invention to cells by administering polypeptides of the invention (e.g., polypeptides encoded by polynucleotides of the invention and/or antibodies) that are associated with heterologous polypeptides or nucleic acids. In one example, the invention provides a method for delivering a therapeutic protein into the targeted cell. In another example, the invention provides a method for delivering a single stranded nucleic acid (e.g., antisense or ribozymes) or double stranded nucleic acid (e.g., DNA that can integrate into the cell's genome or replicate episomally and that can be transcribed) into the targeted cell.

[0332] In another embodiment, the invention provides a method for the specific destruction of cells (e.g., the destruction of tumor cells) by administering polypeptides of the invention in association with toxins or cytotoxic prodrugs.

[0333] In a preferred embodiment, the invention provides a method for the specific destruction of ovarian and/or breast cells (e.g., aberrant ovarian cells, aberrant breast cells, ovarian neoplasm, breast neoplasm) by administering polypeptides of the invention (e.g., polypeptides encoded by polynucleotides of the invention and/or antibodies) in association with toxins or cytotoxic prodrugs.

[0334] By “toxin” is meant one or more compounds that bind and activate endogenous cytotoxic effector systems, radioisotopes, holotoxins, modified toxins, catalytic subunits of toxins, or any molecules or enzymes not normally present in or on the surface of a cell that under defined conditions cause the cell's death. Toxins that may be used according to the methods of the invention include, but are not limited to, radioisotopes known in the art, compounds such as, for example, antibodies (or complement fixing containing portions thereof) that bind an inherent or induced endogenous cytotoxic effector system, thymidine kinase, endonuclease, RNAse, alpha toxin, ricin, abrin, Pseudomonas exotoxin A, diphtheria toxin, saporin, momordin, gelonin, pokeweed antiviral protein, alpha-sarcin and cholera toxin. “Toxin” also includes a cytostatic or cytocidal agent, a therapeutic agent or a radioactive metal ion, e.g., alpha-emitters such as, for example, ²¹³Bi, or other radioisotopes such as, for example, 103Pd, ¹³³xe, 131I, ⁶⁸Ge, ⁵⁷Co, ⁶⁵Zn, ⁸⁵Sr, ³²p, 35s, ⁹⁰Y, ¹⁵³Sm, ¹⁵³Gd, ¹⁶⁹Yb, ⁵¹Cr, ⁵⁴Mn, ⁷⁵Se, ¹¹³Sn, 90Yttrium, 117Tin, ¹⁸⁶Rhenium, ¹⁶⁶HolMium, and ¹⁸⁸Rhenium; luminescent labels, such as luminol; and fluorescent labels, such as fluorescein and rhodamine, and biotin.

[0335] Techniques known in the art may be applied to label polypeptides of the invention (including antibodies). Such techniques include, but are not limited to, the use of bifunctional conjugating agents (see e.g., U.S. Pat. Nos. 5,756,065; 5,714,631; 5,696,239; 5,652,361; 5,505,931; 5,489,425; 5,435,990; 5,428,139; 5,342,604; 5,274,119; 4,994,560; and 5,808,003; the contents of each of which are hereby incorporated by reference in its entirety).

[0336] Thus, the invention provides a diagnostic method of a disorder, which involves (a) assaying the expression level of a breast, ovarian, breast cancer and/or ovarian cancer polypeptide of the present invention in cells or body fluid of an individual, or more preferrably, assaying the expression level of a breast, ovarian, breast cancer and/or ovarian cancer of the present invention in breast and/or ovarian cells or vaginal pool or breast milk of an individual; and (b) comparing the assayed polypeptide expression level with a standard polypeptide expression level, whereby an increase or decrease in the assayed polypeptide expression level compared to the standard expression level is indicative of a disorder. With respect to cancer, the presence of a relatively high amount of transcript in biopsied tissue from an individual may indicate a predisposition for the development of the disease, or may provide a means for detecting the disease prior to the appearance of actual clinical symptoms. A more definitive diagnosis of this type may allow health professionals to employ preventative measures or aggressive treatment earlier thereby preventing the development or further progression of the cancer.

[0337] Moreover, ovarian and/or breast antigen polypeptides of the present invention can be used to treat or prevent diseases or conditions such as, for example, neural disorders, immune system disorders, muscular disorders, reproductive disorders, gastrointestinal disorders, pulmonary disorders, cardiovascular disorders, renal disorders, proliferative disorders, and/or cancerous diseases and conditions, preferably proliferative disorders of the breast and/or ovary, and/or cancerous disease and conditions. For example, patients can be administered a polypeptide of the present invention in an effort to replace absent or decreased levels of the polypeptide (e.g., insulin), to supplement absent or decreased levels of a different polypeptide (e.g., hemoglobin S for hemoglobin B, SOD, catalase, DNA repair proteins), to inhibit the activity of a polypeptide (e.g., an oncogene or tumor supressor), to activate the activity of a polypeptide (e.g., by binding to a receptor), to reduce the activity of a membrane bound receptor by competing with it for free ligand (e.g., soluble TNF receptors used in reducing inflammation), or to bring about a desired response (e.g., blood vessel growth inhibition, enhancement of the immune response to proliferative cells or tissues).

[0338] Similarly, antibodies directed to a polypeptide of the present invention can also be used to treat disease (as described supra, and elsewhere herein). For example, administration of an antibody directed to a polypeptide of the present invention can bind, and/or neutralize the polypeptide, and/or reduce overproduction of the polypeptide. Similarly, administration of an antibody can activate the polypeptide, such as by binding to a polypeptide bound to a membrane (receptor).

[0339] At the very least, the polypeptides of the present invention can be used as molecular weight markers on SDS-PAGE gels or on molecular sieve gel filtration columns using methods well known to those of skill in the art. Polypeptides can also be used to raise antibodies, which in turn are used to measure protein expression from a recombinant cell, as a way of assessing transformation of the host cell. Moreover, the polypeptides of the present invention can be used to test the following biological activities.

[0340] Diagnostic Asssays

[0341] The compounds of the present invention are useful for diagnosis, treatment, prevention and/or prognosis of various ovary and/or breast related disorders in mammals, preferably humans. Such disorders include, but are not limited to, neoplastic disorders (e.g., ovarian Krukenberg tumor, malignant mixed Mullerian tumors, and/or as described under “Hyperproliferative Disorders” below), infectious diseases (e.g., mastitis, oophoritis, and/or as described under “Infectious Diseases” below), and inflammatory diseases (e.g., abcesses and/or as described under “Immune Disorders” below), and as described under “Reproductive System Disorders” below.

[0342] Ovarian and/or breast antigens are expressed in ovarian and/or breast, with an increased expression level in the ovaries and/or breast. For a number of ovarian and/or breast-related disorders, substantially altered (increased or decreased) levels of ovarian and/or breast antigen gene expression can be detected in ovarian and/or breast tissue or other cells or bodily fluids (e.g., sera, plasma, urine, semen, synovial fluid or spinal fluid) taken from an individual having such a disorder, relative to a “standard” ovarian and/or breast antigen gene expression level, that is, the ovarian and/or breast antigen expression level in ovarian and/or breast tissues or bodily fluids from an individual not having the ovarian and/or breast disorder. Thus, the invention provides a diagnostic method useful during diagnosis of an ovarian and/or breast disorder, which involves measuring the expression level of the gene encoding the ovarian and/or breast associated polypeptide in ovarian and/or breast tissue or other cells or body fluid from an individual and comparing the measured gene expression level with a standard ovarian and/or breast antigens gene expression level, whereby an increase or decrease in the gene expression level(s) compared to the standard is indicative of an ovarian and/or breast disorder.

[0343] In specific embodiments, the invention provides a diagnostic method useful during diagnosis of a disorder of a normal or diseased tissue/cell source, which involves measuring the expression level of the coding sequence of a polynucleotide sequence associated with this tissue/cell source as disclosed by Tables 1 and 5 in the tissue/cell source or other cells or body fluid from an individual and comparing the expression level of the coding sequence with a standard expression level of the coding sequence of a polynucleotide sequence, whereby an increase or decrease in the gene expression level(s) compared to the standard is indicative of a disorder of a normal or diseased tissue/cell source.

[0344] In particular, it is believed that certain tissues in mammals with cancer of cells or tissue of the ovaries and/or breast express significantly enhanced or reduced levels of normal or altered ovarian and/or breast antigen expression and mRNA encoding the ovarian and/or breast associated polypeptide when compared to a corresponding “standard” level. Further, it is believed that enhanced or depressed levels of the ovarian and/or breast associated polypeptide can be detected in certain body fluids (e.g., sera, plasma, urine, and spinal fluid) or cells or tissue from mammals with such a cancer when compared to sera from mammals of the same species not having the cancer.

[0345] For example, as disclosed herein, ovarian and/or breast associated polypeptides of the invention are expressed in the ovaries and/or breast. Accordingly, polynucleotides of the invention (e.g., polynucleotide sequences complementary to all or a portion of an ovarian and/or breast antigen mRNA nucleotide sequence of SEQ ID NO:X, the nucleotide coding sequence of the related cDNA contained in a deposited library, a nucleotide sequence encoding SEQ ID NO:Y, a nucleotide sequence encoding a polypeptide encoded by SEQ ID NO:X, the nucleotide sequence encoding the polypeptide encoded by the cDNA in the related cDNA contained in a deposited library, polynucleotide fragments of any of these nucleic acid molecules (e.g., those fragments described herein), and/or antibodies (and antibody fragments) directed against the polypeptides of the invention may be used to quantitate or qualitate concentrations of cells of the ovaries and/or breast expressing ovarian and/or breast antigens, preferrably on their cell surfaces. These polynucleotides and antibodies additionally have diagnostic applications in detecting abnormalities in the level of ovarian and/or breast antigens gene expression, or abnormalities in the structure and/or temporal, tissue, cellular, or subcellular location of ovarian and/or breast antigens. These diagnostic assays may be performed in vivo or in vitro, such as, for example, on blood samples, biopsy tissue or autopsy tissue.

[0346] Thus, the invention provides a diagnostic method useful during diagnosis of an ovarian and/or breast disorder, including cancers, which involves measuring the expression level of the gene encoding the ovarian and/or breast antigen polypeptide in ovary and/or breast tissue or other cells or body fluid from an individual and comparing the measured gene expression level with a standard ovarian and/or breast antigen gene expression level, whereby an increase or decrease in the gene expression level compared to the standard is indicative of a ovarian and/or breast disorder.

[0347] Where a diagnosis of a disorder in the ovaries and/or breast, including diagnosis of a tumor, has already been made according to conventional methods, the present invention is useful as a prognostic indicator, whereby patients exhibiting enhanced or depressed ovarian and/or breast antigen gene expression will experience a worse clinical outcome relative to patients expressing the gene at a level nearer the standard level.

[0348] By “assaying the expression level of the gene encoding the ovarian and/or breast associated polypeptide” is intended qualitatively or quantitatively measuring or estimating the level of the ovarian and/or breast antigen polypeptide or the level of the mRNA encoding the ovarian and/or breast antigen polypeptide in a first biological sample either directly (e.g., by determining or estimating absolute protein level or mRNA level) or relatively (e.g., by comparing to the ovarian and/or breast associated polypeptide level or mRNA level in a second biological sample). Preferably, the ovarian and/or breast antigen polypeptide expression level or mRNA level in the first biological sample is measured or estimated and compared to a standard ovarian and/or breast antigen polypeptide level or mRNA level, the standard being taken from a second biological sample obtained from an individual not having the disorder or being determined by averaging levels from a population of individuals not having a disorder of the colon and/or rectum. As will be appreciated in the art, once a standard ovarian and/or breast antigen polypeptide level or mRNA level is known, it can be used repeatedly as a standard for comparison.

[0349] By “biological sample” is intended any biological sample obtained from an individual, cell line, tissue culture, or other source containing ovarian and/or breast antigen polypeptides (including portions thereof) or mRNA. As indicated, biological samples include body fluids (such as sera, plasma, urine, synovial fluid and spinal fluid) which contain cells expressing ovarian and/or breast antigen polypeptides, ovarian and/or breast tissue, and other tissue sources found to express the full length or fragments thereof of an ovarian and/or breast antigen. Methods for obtaining tissue biopsies and body fluids from mammals are well known in the art. Where the biological sample is to include mRNA, a tissue biopsy is the preferred source.

[0350] Total cellular RNA can be isolated from a biological sample using any suitable technique such as the single-step guanidinium-thiocyanate-phenol-chloroform method described in Chomczynski and Sacchi, Anal. Biochem. 162:156-159 (1987). Levels of mRNA encoding the ovarian and/or breast antigen polypeptides are then assayed using any appropriate method. These include Northern blot analysis, S1 nuclease mapping, the polymerase chain reaction (PCR), reverse transcription in combination with the polymerase chain reaction (RT-PCR), and reverse transcription in combination with the ligase chain reaction (RT-LCR).

[0351] The present invention also relates to diagnostic assays such as quantitative and diagnostic assays for detecting levels of ovarian and/or breast antigen polypeptides, in a biological sample (e.g., cells and tissues), including determination of normal and abnormal levels of polypeptides. Thus, for instance, a diagnostic assay in accordance with the invention for detecting over-expression of ovarian and/or breast antigens compared to normal control tissue samples may be used to detect the presence of tumors. Assay techniques that can be used to determine levels of a polypeptide, such as an ovarian and/or breast antigen polypeptide of the present invention in a sample derived from a host are well-known to those of skill in the art. Such assay methods include radioimmunoassays, competitive-binding assays, Western Blot analysis and ELISA assays. Assaying ovarian and/or breast antigen polypeptide levels in a biological sample can occur using any art-known method.

[0352] Assaying ovarian and/or breast antigen polypeptide levels in a biological sample can occur using antibody-based techniques. For example, ovarian and/or breast antigen polypeptide expression in tissues can be studied with classical immunohistological methods (Jalkanen et al., J. Cell. Biol. 101:976-985 (1985); Jalkanen, M., et al., J. Cell . Biol. 105:3087-3096 (1987)). Other antibody-based methods useful for detecting ovarian and/or breast antigen polypeptide gene expression include immunoassays, such as the enzyme linked immunosorbent assay (ELISA) and the radioimmunoassay (RIA). Suitable antibody assay labels are known in the art and include enzyme labels, such as, glucose oxidase, and radioisotopes, such as iodine (¹²⁵I, ¹²¹I), carbon (¹⁴C), sulfur (³⁵S), tritium (³H), indium (¹¹²In), and technetium (^{99m}Tc), and fluorescent labels, such as fluorescein and rhodamine, and biotin.

[0353] The tissue or cell type to be analyzed will generally include those which are known, or suspected, to express the ovarian and/or breast antigen gene (such as, for example, cells of the ovary and/or breast and/or ovarian and/or breast cancers). The protein isolation methods employed herein may, for example, be such as those described in Harlow and Lane (Harlow, E. and Lane, D., 1988, “Antibodies: A Laboratory Manual”, Cold Spring Harbor Laboratory Press, Cold Spring Harbor, New York), which is incorporated herein by reference in its entirety. The isolated cells can be derived from cell culture or from a patient. The analysis of cells taken from culture may be a necessary step in the assessment of cells that could be used as part of a cell-based gene therapy technique or, alternatively, to test the effect of compounds on the expression of the ovarian and/or breast antigen gene.

[0354] For example, antibodies, or fragments of antibodies, such as those described herein, may be used to quantitatively or qualitatively detect the presence of ovarian and/or breast antigen gene products or conserved variants or peptide fragments thereof. This can be accomplished, for example, by immunofluorescence techniques employing a fluorescently labeled antibody coupled with light microscopic, flow cytometric, or fluorimetric detection.

[0355] In a preferred embodiment, antibodies, or fragments of antibodies directed to any one or all of the predicted epitope domains of the ovarian and/or breast antigen polypeptides (Shown in Table 4) may be used to quantitatively or qualitatively detect the presence of ovarian and/or breast antigen gene products or conserved variants or peptide fragments thereof. This can be accomplished, for example, by immunofluorescence techniques employing a fluorescently labeled antibody coupled with light microscopic, flow cytometric, or fluorimetric detection.

[0356] In an additional preferred embodiment, antibodies, or fragments of antibodies directed to a conformational epitope of an ovarian and/or breast antigen may be used to quantitatively or qualitatively detect the presence of ovarian and/or breast antigen gene products or conserved variants or peptide fragments thereof. This can be accomplished, for example, by immunofluorescence techniques employing a fluorescently labeled antibody coupled with light microscopic, flow cytometric, or fluorimetric detection.

[0357] The antibodies (or fragments thereof), and/or ovarian and/or breast antigen polypeptides of the present invention may, additionally, be employed histologically, as in immunofluorescence, immunoelectron microscopy or non-immunological assays, for in situ detection of ovarian and/or breast antigen gene products or conserved variants or peptide fragments thereof. In situ detection may be accomplished by removing a histological specimen from a patient, and applying thereto a labeled antibody or ovarian and/or breast antigen polypeptide of the present invention. The antibody (or fragment thereof) or ovarian and/or breast antigen polypeptide is preferably applied by overlaying the labeled antibody (or fragment) onto a biological sample. Through the use of such a procedure, it is possible to determine not only the presence of the ovarian and/or breast antigen gene product, or conserved variants or peptide fragments, or ovarian and/or breast antigen polypeptide binding, but also its distribution in the examined tissue. Using the present invention, those of ordinary skill will readily perceive that any of a wide variety of histological methods (such as staining procedures) can be modified in order to achieve such in situ detection.

[0358] Immunoassays and non-immunoassays for ovarian and/or breast antigen gene products or conserved variants or peptide fragments thereof will typically comprise incubating a sample, such as a biological fluid, a tissue extract, freshly harvested cells, or lysates of cells which have been incubated in cell culture, in the presence of a detectably labeled antibody capable of binding ovarian and/or breast antigen gene products or conserved variants or peptide fragments thereof, and detecting the bound antibody by any of a number of techniques well-known in the art.

[0359] The biological sample may be brought in contact with and immobilized onto a solid phase support or carrier such as nitrocellulose, or other solid support which is capable of immobilizing cells, cell particles or soluble proteins. The support may then be washed with suitable buffers followed by treatment with the detectably labeled anti-ovarian and/or breast antigen antibody or detectable ovarian and/or breast antigen polypeptide. The solid phase support may then be washed with the buffer a second time to remove unbound antibody or polypeptide. Optionally the antibody is subsequently labeled. The amount of bound label on solid support may then be detected by conventional means.

[0360] By “solid phase support or carrier” is intended any support capable of binding an antigen or an antibody. Well-known supports or carriers include glass, polystyrene, polypropylene, polyethylene, dextran, nylon, amylases, natural and modified celluloses, polyacrylamides, gabbros, and magnetite. The nature of the carrier can be either soluble to some extent or insoluble for the purposes of the present invention. The support material may have virtually any possible structural configuration so long as the coupled molecule is capable of binding to an antigen or antibody. Thus, the support configuration may be spherical, as in a bead, or cylindrical, as in the inside surface of a test tube, or the external surface of a rod. Alternatively, the surface may be flat such as a sheet, test strip, etc. Preferred supports include polystyrene beads. Those skilled in the art will know many other suitable carriers for binding antibody or antigen, or will be able to ascertain the same by use of routine experimentation.

[0361] The binding activity of a given lot of anti-ovarian and/or breast antigen antibody or ovarian and/or breast antigen polypeptide may be determined according to well known methods. Those skilled in the art will be able to determine operative and optimal assay conditions for each determination by employing routine experimentation.

[0362] In addition to assaying ovarian and/or breast antigen polypeptide levels or polynucleotide levels in a biological sample obtained from an individual, ovarian and/or breast antigen polypeptide or polynucleotide can also be detected in vivo by imaging. For example, in one embodiment of the invention, ovarian and/or breast antigen polypeptide and/or anti-ovarian and/or breast antigen antibodies are used to image ovarian and/or breast diseased cells, such as neoplasms. In another embodiment, ovarian and/or breast antigen polynucleotides of the invention (e.g., polynucleotides complementary to all or a portion of ovarian and/or breast antigen mRNA) and/or anti-ovarian and/or breast antigen antibodies (e.g., antibodies directed to any one or a combination of the epitopes of ovarian and/or breast antigens, antibodies directed to a conformational epitope of ovarian and/or breast antigens, antibodies directed to the full length polypeptide expressed on the cell surface of a mammalian cell) are used to image diseased or neoplastic cells of the ovary and/or breast.

[0363] Antibody labels or markers for in vivo imaging of ovarian and/or breast antigen polypeptides include those detectable by X-radiography, NMR, MRI, CAT-scans or ESR. For X-radiography, suitable labels include radioisotopes such as barium or cesium, which emit detectable radiation but are not overtly harmful to the subject. Suitable markers for NMR and ESR include those with a detectable characteristic spin, such as deuterium, which may be incorporated into the antibody by labeling of nutrients for the relevant hybridoma. Where in vivo imaging is used to detect enhanced levels of ovarian and/or breast antigen polypeptides for diagnosis in humans, it may be preferable to use human antibodies or “humanized” chimeric monoclonal antibodies. Such antibodies can be produced using techniques described herein or otherwise known in the art. For example methods for producing chimeric antibodies are known in the art. See, for review, Morrison, Science 229:1202 (1985); Oi et al., BioTechniques 4:214 (1986); Cabilly et al., U.S. Pat. No. 4,816,567; Taniguchi et al., EP 171496; Morrison et al., EP 173494; Neuberger et al., WO 8601533; Robinson et al., WO 8702671; Boulianne et al., Nature 312:643 (1984); Neuberger et al., Nature 314:268 (1985).

[0364] Additionally, any ovarian and/or breast antigen polypeptides whose presence can be detected, can be administered. For example, ovarian and/or breast antigen polypeptides labeled with a radio-opaque or other appropriate compound can be administered and visualized in vivo, as discussed, above for labeled antibodies. Further such ovarian and/or breast antigen polypeptides can be utilized for in vitro diagnostic procedures.

[0365] A ovarian and/or breast antigen polypeptide-specific antibody or antibody fragment which has been labeled with an appropriate detectable imaging moiety, such as a radioisotope (for example, ¹³¹I, ¹¹²In, ^{99m}Tc), a radio-opaque substance, or a material detectable by nuclear magnetic resonance, is introduced (for example, parenterally, subcutaneously or intraperitoneally) into the mammal to be examined for an ovarian and/or breast disorder. It will be understood in the art that the size of the subject and the imaging system used will determine the quantity of imaging moiety needed to produce diagnostic images. In the case of a radioisotope moiety, for a human subject, the quantity of radioactivity injected will normally range from about 5 to 20 millicuries of ^{99m}Tc. The labeled antibody or antibody fragment will then preferentially accumulate at the location of cells which contain ovarian and/or breast antigen protein. In vivo tumor imaging is described in S. W. Burchiel et al., “Immunopharmacokinetics of Radiolabeled Antibodies and Their Fragments” (Chapter 13 in Tumor Imaging: The Radiochemical Detection of Cancer, S. W. Burchiel and B. A. Rhodes, eds., Masson Publishing Inc. (1982)).

[0366] With respect to antibodies, one of the ways in which the anti-ovarian and/or breast antigen antibody can be detectably labeled is by linking the same to an enzyme and using the linked product in an enzyme immunoassay (EIA) (Voller, A., “The Enzyme Linked Immunosorbent Assay (ELISA)”, 1978, Diagnostic Horizons 2:1-7, Microbiological Associates Quarterly Publication, Walkersville, Md.); Voller et al., J. Clin. Pathol. 31:507-520 (1978); Butler, J. E., Meth. Enzymol. 73:482-523 (1981); Maggio, E. (ed.), 1980, Enzyme Immunoassay, CRC Press, Boca Raton, Fla.; Ishikawa, E. et al., (eds.), 1981, Enzyme Immunoassay, Kgaku Shoin, Tokyo). The enzyme, which is bound to the antibody will react with an appropriate substrate, preferably a chromogenic substrate, in such a manner as to produce a chemical moiety which can be detected, for example, by spectrophotometric, fluorimetric or by visual means. Enzymes which can be used to detectably label the antibody include, but are not limited to, malate dehydrogenase, staphylococcal nuclease, delta-5-steroid isomerase, yeast alcohol dehydrogenase, alpha-glycerophosphate, dehydrogenase, triose phosphate isomerase, horseradish peroxidase, alkaline phosphatase, asparaginase, glucose oxidase, beta-galactosidase, ribonuclease, urease, catalase, glucose-6-phosphate dehydrogenase, glucoamylase and acetylcholinesterase. Additionally, the detection can be accomplished by colorimetric methods which employ a chromogenic substrate for the enzyme. Detection may also be accomplished by visual comparison of the extent of enzymatic reaction of a substrate in comparison with similarly prepared standards.

[0367] Detection may also be accomplished using any of a variety of other immunoassays. For example, by radioactively labeling the antibodies or antibody fragments, it is possible to detect ovarian and/or breast antigens through the use of a radioimmunoassay (RIA) (see, for example, Weintraub, B., Principles of Radioimmunoassays, Seventh Training Course on Radioligand Assay Techniques, The Endocrine Society, March, 1986, which is incorporated by reference herein). The radioactive isotope can be detected by means including, but not limited to, a gamma counter, a scintillation counter, or autoradiography.

[0368] It is also possible to label the antibody with a fluorescent compound. When the fluorescently labeled antibody is exposed to light of the proper wave length, its presence can then be detected due to fluorescence. Among the most commonly used fluorescent labeling compounds are fluorescein isothiocyanate, rhodamine, phycoerythrin, phycocyanin, allophycocyanin, ophthaldehyde and fluorescamine.

[0369] The antibody can also be detectably labeled using fluorescence emitting metals such as ¹²⁵Eu, or others of the lanthanide series. These metals can be attached to the antibody using such metal chelating groups as diethylenetriaminepentacetic acid (DTPA) or ethylenediaminetetraacetic acid (EDTA).

[0370] The antibody also can be detectably labeled by coupling it to a chemiluminescent compound. The presence of the chemiluminescent-tagged antibody is then determined by detecting the presence of luminescence that arises during the course of a chemical reaction. Examples of particularly useful chemiluminescent labeling compounds are luminol, isoluminol, theromatic acridinium ester, imidazole, acridinium salt and oxalate ester.

[0371] Likewise, a bioluminescent compound may be used to label the antibody of the present invention. Bioluminescence is a type of chemiluminescence found in biological systems in, which a catalytic protein increases the efficiency of the chemiluminescent reaction. The presence of a bioluminescent protein is determined by detecting the presence of luminescence. Important bioluminescent compounds for purposes of labeling are luciferin, luciferase and aequorin.

[0372] Methods for Detecting Ovarian And/Or Breast Disease, Including Cancer

[0373] In general, an ovarian and/or breast disease or cancer may be detected in a patient based on the presence of one or more ovarian and/or breast antigen proteins of the invention and/or polynucleotides encoding such proteins in a biological sample (for example, blood, sera, urine, and/or tumor biopsies) obtained from the patient. In other words, such proteins and/or polynucleotides may be used as markers to indicate the presence or absence of an ovarian and/or breast disease or disorder, including cancer. Cancers that may be diagnosed, and/or prognosed using the compositions of the invention include but are not limited to, ovarian and/or breast cancer. The binding agents provided herein generally permit detection of the level of antigen that binds to the agent in the biological sample. Polynucleotide primers and probes may be used to detect the level of mRNA encoding ovarian and/or breast antigen polypeptides, which is also indicative of the presence or absence of an ovarian and/or breast disease or disorder, including cancer. In general, ovarian and/or breast antigen polypeptides should be present at a level that is at least three fold higher in diseased tissue than in normal tissue.

[0374] There are a variety of assay formats known to those of ordinary skill in the art for using a binding agent to detect polypeptide markers in a sample. See, e.g., Harlow and Lane, supra. In general, the presence or absence of an ovarian and/or breast disease in a patient may be determined by (a) contacting a biological sample obtained from a patient with a binding agent; (b) detecting in the sample a level of polypeptide that binds to the binding agent; and (c) comparing the level of polypeptide with a predetermined cut-off value.

[0375] In a preferred embodiment, the assay involves the use of binding agent immobilized on a solid support to bind to and remove the ovarian and/or breast antigen polypeptide of the invention from the remainder of the sample. The bound polypeptide may then be detected using a detection reagent that contains a reporter group and specifically binds to the binding agent/polypeptide complex. Such detection reagents may comprise, for example, a binding agent that specifically binds to the polypeptide or an antibody or other agent that specifically binds to the binding agent, such as an anti-immunoglobulin, protein G, protein A or a lectin. Alternatively, a competitive assay may be utilized, in which a polypeptide is labeled with a reporter group and allowed to bind to the immobilized binding agent after incubation of the binding agent with the sample. The extent to which components of the sample inhibit the binding of the labeled polypeptide to the binding agent is indicative of the reactivity of the sample with the immobilized binding agent. Suitable polypeptides for use within such assays include ovarian and/or breast antigen polypeptides and portions thereof, or antibodies, to which the binding agent binds, as described above.

[0376] The solid support may be any material known to those of skill in the art to which ovarian and/or breast antigen polypeptides of the invention may be attached. For example, the solid support may be a test well in a microtiter plate or a nitrocellulose or other suitable membrane. Alternatively, the support may be a bead or disc, such as glass fiberglass, latex or a plastic material such as polystyrene or polyvinylchloride. The support may also be a magnetic particle or a fiber optic sensor, such as those disclosed, for example, in U.S. Pat. No. 5,359,681. The binding agent may be immobilized on the solid support using a variety of techniques known to those of skill in the art, which are amply described in the patent and scientific literature. In the context of the present invention, the term “immobilization” refers to both noncovalent association, such as adsorption, and covalent attachment (which may be a direct linkage between the agent and functional groups on the support or may be a linkage by way of a cross-linking agent). Immobilization by adsorption to a well in a microtiter plate or to a membrane is preferred. In such cases, adsorption may be achieved by contacting the binding agent, in a suitable buffer, with the solid support for the suitable amount of time. The contact time varies with temperature, but is typically between about 1 hour and about 1 day. In general, contacting a well of plastic microtiter plate (such as polystyrene or polyvinylchloride) with an amount of binding agent ranging from about 10 ng to about 10 ug, and preferably about 100 ng to about 1 ug, is sufficient to immobilize an adequate amount of binding agent.

[0377] Covalent attachment of binding agent to a solid support may generally be achieved by first reacting the support with a bifunctional reagent that will react with both the support and a functional group, such as a hydroxyl or amino group, on the binding agent. For example, the binding agent may be covalently attached to supports having an appropriate polymer coating using benzoquinone or by condensation of an aldehyde group on the support with an amine and an active hydrogen on the binding partner (see, e.g., Pierce Immunotechnology Catalog and Handbook, 1991, at A12-A13).

[0378] Gene Therapy Methods

[0379] Another aspect of the present invention is to gene therapy methods for treating or preventing disorders, diseases and conditions. The gene therapy methods relate to the introduction of nucleic acid (DNA, RNA and antisense DNA or RNA) sequences into an animal to achieve expression of the polypeptide of the present invention. This method requires a polynucleotide which codes for a polypeptide of the present invention operatively linked to a promoter and any other genetic elements necessary for the expression of the polypeptide by the target tissue. Such gene therapy and delivery techniques are known in the art, see, for example, WO90/11092, which is herein incorporated by reference.

[0380] Thus, for example, cells from a patient may be engineered with a polynucleotide (DNA or RNA) comprising a promoter operably linked to a polynucleotide of the present invention ex vivo, with the engineered cells then being provided to a patient to be treated with the polypeptide of the present invention. Such methods are well-known in the art. For example, see Belldegrun, A., et al., J. Natl. Cancer Inst. 85: 207-216 (1993); Ferrantini, M. et al., Cancer Research 53: 1107-1112 (1993); Ferrantini, M. et al., J. Imunology 153: 4604-4615 (1994); Kaido, T., et al., Int. J. Cancer 60: 221-229 (1995); Ogura, H., et al., Cancer Research 50: 5102-5106 (1990); Santodonato, L., et al., Human Gene Therapy 7:1-10 (1996); Santodonato, L., et al., Gene Therapy 4:1246-1255 (1997); and Zhang, J. -F. et al., Cancer Gene Therapy 3: 31-38 (1996)), which are herein incorporated by reference. In one embodiment, the cells which are engineered are arterial cells. The arterial cells may be reintroduced into the patient through direct injection to the artery, the tissues surrounding the artery, or through catheter injection.

[0381] As discussed in more detail below, the polynucleotide constructs can be delivered by any method that delivers injectable materials to the cells of an animal, such as, injection into the interstitial space of tissues (heart, muscle, skin, lung, liver, and the like). The polynucleotide constructs may be delivered in a pharmaceutically acceptable liquid or aqueous carrier.

[0382] In one embodiment, the polynucleotide of the present invention is delivered as a naked polynucleotide. The term “naked” polynucleotide, DNA or RNA refers to sequences that are free from any delivery vehicle that acts to assist, promote or facilitate entry into the cell, including viral sequences, viral particles, liposome formulations, lipofectin or precipitating agents and the like. However, the polynucleotide of the present invention can also be delivered in liposome formulations and lipofectin formulations and the like can be prepared by methods well known to those skilled in the art. Such methods are described, for example, in U.S. Pat. Nos. 5,593,972, 5,589,466, and 5,580,859, which are herein incorporated by reference.

[0383] The polynucleotide vector constructs used in the gene therapy method are preferably constructs that will not integrate into the host genome nor will they contain sequences that allow for replication. Appropriate vectors include pWLNEO, pSV2CAT, pOG44, pXT1 and pSG available from Stratagene; pSVK3, pBPV, pMSG and pSVL available from Pharmacia; and pEF1/V5, pcDNA3.1, and pRc/CMV2 available from Invitrogen. Other suitable vectors will be readily apparent to the skilled artisan.

[0384] Any strong promoter known to those skilled in the art can be used for driving the expression of the polynucleotide sequence. Suitable promoters include adenoviral promoters, such as the adenoviral major late promoter; or heterologous promoters, such as the cytomegalovirus (CMV) promoter; the respiratory syncytial virus (RSV) promoter; inducible promoters, such as the MMT promoter, the metallothionein promoter; heat shock promoters; the albumin promoter; the ApoAI promoter; human globin promoters; viral thymidine kinase promoters, such as the Herpes Simplex thymidine kinase promoter; retroviral LTRs; the b-actin promoter; and human growth hormone promoters. The promoter also may be the native promoter for the polynucleotide of the present invention.

[0385] Unlike other gene therapy techniques, one major advantage of introducing naked nucleic acid sequences into target cells is the transitory nature of the polynucleotide synthesis in the cells. Studies have shown that non-replicating DNA sequences can be introduced into cells to provide production of the desired polypeptide for periods of up to six months.

[0386] The polynucleotide construct can be delivered to the interstitial space of tissues within the an animal, including of muscle, skin, brain, lung, liver, spleen, bone marrow, thymus, heart, lymph, blood, bone, cartilage, pancreas, kidney, gall bladder, stomach, intestine, testis, ovary, uterus, rectum, nervous system, eye, gland, and connective tissue. Interstitial space of the tissues comprises the intercellular, fluid, mucopolysaccharide matrix among the reticular fibers of organ tissues, elastic fibers in the walls of vessels or chambers, collagen fibers of fibrous tissues, or that same matrix within connective tissue ensheathing muscle cells or in the lacunae of bone. It is similarly the space occupied by the plasma of the circulation and the lymph fluid of the lymphatic channels. Delivery to the interstitial space of muscle tissue is preferred for the reasons discussed below. They may be conveniently delivered by injection into the tissues comprising these cells. They are preferably delivered to and expressed in persistent, non-dividing cells which are differentiated, although delivery and expression may be achieved in non-differentiated or less completely differentiated cells, such as, for example, stem cells of blood or skin fibroblasts. In vivo muscle cells are particularly competent in their ability to take up and express polynucleotides.

[0387] For the naked nucleic acid sequence injection, an effective dosage amount of DNA or RNA will be in the range of from about 0.05 mg/kg body weight to about 50 mg/kg body weight. Preferably the dosage will be from about 0.005 mg/kg to about 20 mg/kg and more preferably from about 0.05 mg/kg to about 5 mg/kg. Of course, as the artisan of ordinary skill will appreciate, this dosage will vary according to the tissue site of injection. The appropriate and effective dosage of nucleic acid sequence can readily be determined by those of ordinary skill in the art and may depend on the condition being treated and the route of administration.

[0388] The preferred route of administration is by the parenteral route of injection into the interstitial space of tissues. However, other parenteral routes may also be used, such as, inhalation of an aerosol formulation particularly for delivery to lungs or bronchial tissues, throat or mucous membranes of the nose. In addition, naked DNA constructs can be delivered to arteries during angioplasty by the catheter used in the procedure.

[0389] The naked polynucleotides are delivered by any method known in the art, including, but not limited to, direct needle injection at the delivery site, intravenous injection, topical administration, catheter infusion, and so-called “gene guns”. These delivery methods are known in the art.

[0390] The constructs may also be delivered with delivery vehicles such as viral sequences, viral particles, liposome formulations, lipofectin, precipitating agents, etc. Such methods of delivery are known in the art.

[0391] In certain embodiments, the polynucleotide constructs are complexed in a liposome preparation. Liposomal preparations for use in the instant invention include cationic (positively charged), anionic (negatively charged) and neutral preparations. However, cationic liposomes are particularly preferred because a tight charge complex can be formed between the cationic liposome and the polyanionic nucleic acid. Cationic liposomes have been shown to mediate intracellular delivery of plasmid DNA (Felgner et al., Proc. Natl. Acad. Sci. USA (1987) 84:7413-7416, which is herein incorporated by reference); mRNA (Malone et al., Proc. Natl. Acad. Sci. USA (1989) 86:6077-6081, which is herein incorporated by reference); and purified transcription factors (Debs et al., J. Biol. Chem. (1990) 265:10189-10192, which is herein incorporated by reference), in functional form.

[0392] Cationic liposomes are readily available. For example, N[1-2,3-dioleyloxy)propyl]-N,N,N-triethylammonium (DOTMA) liposomes are particularly useful and are available under the trademark Lipofectin, from GIBCO BRL, Grand Island, N.Y. (See, also, Felgner et al., Proc. Natl Acad. Sci. USA (1987) 84:7413-7416, which is herein incorporated by reference). Other commercially available liposomes include transfectace (DDAB/DOPE) and DOTAP/DOPE (Boehringer).

[0393] Other cationic liposomes can be prepared from readily available materials using techniques well known in the art. See, e.g. PCT Publication No. WO 90/11092 (which is herein incorporated by reference) for a description of the synthesis of DOTAP (1,2-bis(oleoyloxy)-3-(trimethylammonio)propane) liposomes. Preparation of DOTMA liposomes is explained in the literature, see, e.g., P. Felgner et al., Proc. Natl. Acad. Sci. USA 84:7413-7417, which is herein incorporated by reference. Similar methods can be used to prepare liposomes from other cationic lipid materials.

[0394] Similarly, anionic and neutral liposomes are readily available, such as from Avanti Polar Lipids (Birmingham, Ala.), or can be easily prepared using readily available materials. Such materials include phosphatidyl, choline, cholesterol, phosphatidyl ethanolamine, dioleoylphosphatidyl choline (DOPC), dioleoylphosphatidyl glycerol (DOPG), dioleoylphoshatidyl ethanolamine (DOPE), among others. These materials can also be mixed with the DOTMA and DOTAP starting materials in appropriate ratios. Methods for making liposomes using these materials are well known in the art.

[0395] For example, commercially dioleoylphosphatidyl choline (DOPC), dioleoylphosphatidyl glycerol (DOPG), and dioleoylphosphatidyl ethanolamine (DOPE) can be used in various combinations to make conventional liposomes, with or without the addition of cholesterol. Thus, for example, DOPG/DOPC vesicles can be prepared by drying 50 mg each of DOPG and DOPC under a stream of nitrogen gas into a sonication vial. The sample is placed under a vacuum pump overnight and is hydrated the following day with deionized water. The sample is then sonicated for 2 hours in a capped vial, using a Heat Systems model 350 sonicator equipped with an inverted cup (bath type) probe at the maximum setting while the bath is circulated at 15EC. Alternatively, negatively charged vesicles can be prepared without sonication to produce multilamellar vesicles or by extrusion through nucleopore membranes to produce unilamellar vesicles of discrete size. Other methods are known and available to those of skill in the art.

[0396] The liposomes can comprise multilamellar vesicles (MLVs), small unilamellar vesicles (SUVs), or large unilamellar vesicles (LUVs), with SUVs being preferred. The various liposome-nucleic acid complexes are prepared using methods well known in the art. See, e.g., Straubinger et al., Methods of Immunology (1983), 101:512-527, which is herein incorporated by reference. For example, MLVs containing nucleic acid can be prepared by depositing a thin film of phospholipid on the walls of a glass tube and subsequently hydrating with a solution of the material to be encapsulated. SUVs are prepared by extended sonication of MLVs to produce a homogeneous population of unilamellar liposomes. The material to be entrapped is added to a suspension of preformed MLVs and then sonicated. When using liposomes containing cationic lipids, the dried lipid film is resuspended in an appropriate solution such as sterile water or an isotonic buffer solution such as 10 mM Tris/NaCl, sonicated, and then the preformed liposomes are mixed directly with the DNA. The liposome and DNA form a very stable complex due to binding of the positively charged liposomes to the cationic DNA. SUVs find use with small nucleic acid fragments. LUVs are prepared by a number of methods, well known in the art. Commonly used methods include Ca2+-EDTA chelation (Papahadjopoulos et al., Biochim. Biophys. Acta (1975) 394:483; Wilson et al., Cell (1979) 17:77); ether injection (Deamer, D. and Bangham, A., Biochim. Biophys. Acta (1976) 443:629; Ostro et al., Biochem. Biophys. Res. Commun. (1977) 76:836; Fraley et al., Proc. Natl. Acad. Sci. USA (1979) 76:3348); detergent dialysis (Enoch, H. and Strittmatter, P., Proc. Natl. Acad. Sci. USA (1979) 76:145); and reverse-phase evaporation (REV) (Fraley et al., J. Biol. Chem. (1980) 255:10431; Szoka, F. and Papahadjopoulos, D., Proc. Natl. Acad. Sci. USA (1978) 75:145; Schaefer-Ridder et al., Science (1982) 215:166), which are herein incorporated by reference.

[0397] Generally, the ratio of DNA to liposomes will be from about 10:1 to about 1:10. Preferably, the ration will be from about 5:1 to about 1:5. More preferably, the ration will be about 3:1 to about 1:3. Still more preferably, the ratio will be about 1:1.

[0398] U.S. Pat. No. 5,676,954 (which is herein incorporated by reference) reports on the injection of genetic material, complexed with cationic liposomes carriers, into mice. U.S. Pat. Nos. 4,897,355, 4,946,787, 5,049,386, 5,459,127, 5,589,466, 5,693,622, 5,580,859, 5,703,055, and international publication no. WO 94/9469 (which are herein incorporated by reference) provide cationic lipids for use in transfecting DNA into cells and mammals. U.S. Pat. Nos. 5,589,466, 5,693,622, 5,580,859, 5,703,055, and international publication no. WO 94/9469 (which are herein incorporated by reference) provide methods for delivering DNA-cationic lipid complexes to mammals.

[0399] In certain embodiments, cells are engineered, ex vivo or in vivo, using a retroviral particle containing RNA which comprises a sequence encoding a polypeptide of the present invention. Retroviruses from which the retroviral plasmid vectors may be derived include, but are not limited to, Moloney Murine Leukemia Virus, spleen necrosis virus, Rous sarcoma Virus, Harvey Sarcoma Virus, avian leukosis virus, gibbon ape leukemia virus, human immunodeficiency virus, Myeloproliferative Sarcoma Virus, and mammary tumor virus.

[0400] The retroviral plasmid vector is employed to transduce packaging cell lines to form producer cell lines. Examples of packaging cells which may be transfected include, but are not limited to, the PE501, PA317, R-2, R-AM, PA12, T19-14X, VT-19-17-H2, RCRE, RCRIP, GP+E-86, GP+envAml2, and DAN cell lines as described in Miller, Human Gene Therapy 1:5-14 (1990), which is incorporated herein by reference in its entirety. The vector may transduce the packaging cells through any means known in the art. Such means include, but are not limited to, electroporation, the use of liposomes, and CaPO₄ precipitation. In one alternative, the retroviral plasmid vector may be encapsulated into a liposome, or coupled to a lipid, and then administered to a host.

[0401] The producer cell line generates infectious retroviral vector particles which include polynucleotide encoding a polypeptide of the present invention. Such retroviral vector particles then may be employed, to transduce eukaryotic cells, either in vitro or in vivo. The transduced eukaryotic cells will express a polypeptide of the present invention.

[0402] In certain other embodiments, cells are engineered, ex vivo or in vivo, with polynucleotide contained in an adenovirus vector. Adenovirus can be manipulated such that it encodes and expresses a polypeptide of the present invention, and at the same time is inactivated in terms of its ability to replicate in a normal lytic viral life cycle. Adenovirus expression is achieved without integration of the viral DNA into the host cell chromosome, thereby alleviating concerns about insertional mutagenesis. Furthermore, adenoviruses have been used as live enteric vaccines for many years with an excellent safety profile (Schwartz, A. R. et al. (1974) Am. Rev. Respir. Dis.109:233-238). Finally, adenovirus mediated gene transfer has been demonstrated in a number of instances including transfer of alpha-1-antitrypsin and CFTR to the lungs of cotton rats (Rosenfeld, M. A. et al. (1991) Science 252:431-434; Rosenfeld et al., (1992) Cell 68:143-155). Furthermore, extensive studies to attempt to establish adenovirus as a causative agent in human cancer were uniformly negative (Green, M. et al. (1979) Proc. Natl. Acad. Sci. USA 76:6606).

[0403] Suitable adenoviral vectors useful in the present invention are described, for example, in Kozarsky and Wilson, Curr. Opin. Genet. Devel. 3:499-503 (1993); Rosenfeld et al., Cell 68:143-155 (1992); Engelhardt et al., Human Genet. Ther. 4:759-769 (1993); Yang et al., Nature Genet. 7:362-369 (1994); Wilson et al., Nature 365:691-692 (1993); and U.S. Pat. No. 5,652,224, which are herein incorporated by reference. For example, the adenovirus vector Ad2 is useful and can be grown in human 293 cells. These cells contain the E1 region of adenovirus and constitutively express E1a and E1b, which complement the defective adenoviruses by providing the products of the genes deleted from the vector. In addition to Ad2, other varieties of adenovirus (e.g., Ad3, Ad5, and Ad7) are also useful in the present invention.

[0404] Preferably, the adenoviruses used in the present invention are replication deficient. Replication deficient adenoviruses require the aid of a helper virus and/or packaging cell line to form infectious particles. The resulting virus is capable of infecting cells and can express a polynucleotide of interest which is operably linked to a promoter, but cannot replicate in most cells. Replication deficient adenoviruses may be deleted in one or more of all or a portion of the following genes: E1a, E1b, E3, E4, E2a, or L1 through L5.

[0405] In certain other embodiments, the cells are engineered, ex vivo or in vivo, using an adeno-associated virus (AAV). AAVs are naturally occurring defective viruses that require helper viruses to produce infectious particles (Muzyczka, N., Curr. Topics in Microbiol. Immunol. 158:97 (1992)). It is also one of the few viruses that may integrate its DNA into non-dividing cells. Vectors containing as little as 300 base pairs of AAV can be packaged and can integrate, but space for exogenous DNA is limited to about 4.5 kb. Methods for producing and using such AAVs are known in the art. See, for example, U.S. Pat. Nos. 5,139,941, 5,173,414, 5,354,678, 5,436,146, 5,474,935, 5,478,745, and 5,589,377.

[0406] For example, an appropriate AAV vector for use in the present invention will include all the sequences necessary for DNA replication, encapsidation, and host-cell integration. The polynucleotide construct is inserted into the AAV vector using standard cloning methods, such as those found in Sambrook et al., Molecular Cloning: A Laboratory Manual, Cold Spring Harbor Press (1989). The recombinant AAV vector is then transfected into packaging cells which are infected with a helper virus, using any standard technique, including lipofection, electroporation, calcium phosphate precipitation, etc. Appropriate helper viruses include adenoviruses, cytomegaloviruses, vaccinia viruses, or herpes viruses. Once the packaging cells are transfected and infected, they will produce infectious AAV viral particles which contain the polynucleotide construct. These viral particles are then used to transduce eukaryotic cells, either ex vivo or in vivo. The transduced cells will contain the polynucleotide construct integrated into its genome, and will express a polypeptide of the invention.

[0407] Another method of gene therapy involves operably associating heterologous control regions and endogenous polynucleotide sequences (e.g. encoding a polypeptide of the present invention) via homologous recombination (see, e.g., U.S. Pat. No. 5,641,670, issued Jun. 24, 1997; International Publication No. WO 96/29411, published Sep. 26, 1996; International Publication No. WO 94/12650, published Aug. 4, 1994; Koller et al., Proc. Natl. Acad. Sci. USA 86:8932-8935 (1989); and Zijlstra et al., Nature 342:435-438 (1989). This method involves the activation of a gene which is present in the target cells, but which is not normally expressed in the cells, or is expressed at a lower level than desired.

[0408] Polynucleotide constructs are made, using standard techniques known in the art, which contain the promoter with targeting sequences flanking the promoter. Suitable promoters are described herein. The targeting sequence is sufficiently complementary to an endogenous sequence to permit homologous recombination of the promoter-targeting sequence with the endogenous sequence. The targeting sequence will be sufficiently near the 5′ end of the desired endogenous polynucleotide sequence so the promoter will be operably linked to the endogenous sequence upon homologous recombination.

[0409] The promoter and the targeting sequences can be amplified using PCR. Preferably, the amplified promoter contains distinct restriction enzyme sites on the 5′ and 3′ ends. Preferably, the 3′ end of the first targeting sequence contains the same restriction enzyme site as the 5′ end of the amplified promoter and the 5′ end of the second targeting sequence contains the same restriction site as the 3′ end of the amplified promoter. The amplified promoter and targeting sequences are digested and ligated together.

[0410] The promoter-targeting sequence construct is delivered to the cells, either as naked polynucleotide, or in conjunction with transfection-facilitating agents, such as liposomes, viral sequences, viral particles, whole viruses, lipofection, precipitating agents, etc., described in more detail above. The P promoter-targeting sequence can be delivered by any method, included direct needle injection, intravenous injection, topical administration, catheter infusion, particle accelerators, etc. The methods are described in more detail below.

[0411] The promoter-targeting sequence construct is taken up by cells. Homologous recombination between the construct and the endogenous sequence takes place, such that an endogenous sequence is placed under the control of the promoter. The promoter then drives the expression of the endogenous sequence.

[0412] Preferably, the polynucleotide encoding a polypeptide of the present invention contains a secretory signal sequence that facilitates secretion of the protein. Typically, the signal sequence is positioned in the coding region of the polynucleotide to be expressed towards or at the 5′ end of the coding region. The signal sequence may be homologous or heterologous to the polynucleotide of interest and may be homologous or heterologous to the cells to be transfected. Additionally, the signal sequence may be chemically synthesized using methods known in the art.

[0413] Any mode of administration of any of the above-described polynucleotides constructs can be used so long as the mode results in the expression of one or more molecules in an amount sufficient to provide a therapeutic effect. This includes direct needle injection, systemic injection, catheter infusion, biolistic injectors, particle accelerators (i.e., “gene guns”), gelfoam sponge depots, other commercially available depot materials, osmotic pumps (e.g., Alza minipumps), oral or suppositorial solid (tablet or pill) pharmaceutical formulations, and decanting or topical applications during surgery. For example, direct injection of naked calcium phosphate-precipitated plasmid into rat liver and rat spleen or a protein-coated plasmid into the portal vein has resulted in gene expression of the foreign gene in the rat livers (Kaneda et al., Science 243:375 (1989)).

[0414] A preferred method of local administration is by direct injection. Preferably, a recombinant molecule of the present invention complexed with a delivery vehicle is administered by direct injection into or locally within the area of arteries. Administration of a composition locally within the area of arteries refers to injecting the composition centimeters and preferably, millimeters within arteries.

[0415] Another method of local administration is to contact a polynucleotide construct of the present invention in or around a surgical wound. For example, a patient can undergo surgery and the polynucleotide construct can be coated on the surface of tissue inside the wound or the construct can be injected into areas of tissue inside the wound.

[0416] Therapeutic compositions useful in systemic administration, include recombinant molecules of the present invention complexed to a targeted delivery vehicle of the present invention. Suitable delivery vehicles for use with systemic administration comprise liposomes comprising ligands for targeting the vehicle to a particular site.

[0417] Preferred methods of systemic administration, include intravenous injection, aerosol, oral and percutaneous (topical) delivery. Intravenous injections can be performed using methods standard in the art. Aerosol delivery can also be performed using methods standard in the art (see, for example, Stribling et al., Proc. Natl. Acad. Sci. USA 189:11277-11281, 1992, which is incorporated herein by reference). Oral delivery can be performed by complexing a polynucleotide construct of the present invention to a carrier capable of withstanding degradation by digestive enzymes in the gut of an animal Examples of such carriers, include plastic capsules or tablets, such as those known in the art. Topical delivery can be performed by mixing a polynucleotide construct of the present invention with a lipophilic reagent (e.g., DMSO) that is capable of passing into the skin.

[0418] Determining an effective amount of substance to be delivered can depend upon a number of factors including, for example, the chemical structure and biological activity of the substance, the age and weight of the animal, the precise condition requiring treatment and its severity, and the route of administration. The frequency of treatments depends upon a number of factors, such as the amount of polynucleotide constructs administered per dose, as well as the health and history of the subject. The precise amount, number of doses, and timing of doses will be determined by the attending physician or veterinarian.

[0419] Therapeutic compositions of the present invention can be administered to any animal, preferably to mammals and birds. Preferred mammals include humans, dogs, cats, mice, rats, rabbits sheep, cattle, horses and pigs, with humans being particularly preferred.

[0420] Biological Activities

[0421] Polynucleotides or polypeptides, or agonists or antagonists of the present invention, can be used in assays to test for one or more biological activities. If these polynucleotides or polypeptides, or agonists or antagonists of the present invention, do exhibit activity in a particular assay, it is likely that these molecules may be involved in the diseases associated with the biological activity. Thus, the polynucleotides and polypeptides, and agonists or antagonists could be used to treat, prevent diagnose and/or prognose the associated disease.

[0422] The ovarian and/or breast antigen polynucleotides and polypeptides of the invention are predicted to have predominant expression in ovarian and/or breast tissues.

[0423] Thus, the ovarian and/or breast antigens of the invention (e.g., polynucleotides of the invention (e.g., nucleotide coding sequence in SEQ ID NO:X, the nucleotide coding sequence of the related cDNA contained in a deposited library or fragments or variants thereof), polypeptides of the invention (e.g., the polypeptide of SEQ ID NO:Y, a polypeptide encoded by SEQ ID NO:X, a polypeptide encoded by the cDNA in the related cDNA clone contained in a deposited library, and/or fragments or variants thereof), and/or an antibody, or fragment thereof, directed to a polypeptide of the invention) may be useful as therapeutic molecules. Each would be useful for diagnosis, detection, treatment and/or prevention of diseases or disorders of the ovaries and/or breast, neoplastic disorders (e.g., ovarian Krukenberg tumor, malignant mixed Mullerian tumors, and/or as described under “Hyperproliferative Disorders” below), infectious diseases (e.g., mastitis, oophoritis, and/or as described under “Infectious Diseases” below), and inflammatory diseases (e.g., abcesses and/or as described under “Immune Disorders” below), and as described under “Reproductive System Disorders” below.

[0424] Particularly, the ovarian and/or breast antigens may be a useful therapeutic for ovarian and/or breast cancer. Treatment, diagnosis, detection, and/or prevention of ovarian and/or breast disorders could be carried out using an ovarian and/or breast antigen or soluble form of an ovarian and/or breast antigen, an ovarian and/or breast antigen ligand, gene therapy, or ex vivo applications. Moreover, inhibitors of an ovarian and/or breast antigen, either blocking antibodies or mutant forms, could modulate the expression of the ovarian and/or breast antigen. These inhibitors may be useful to treat, diagnose, detect, and/or prevent diseases associated with the misregulation of an ovarian and/or breast antigen.

[0425] In one embodiment, the invention provides a method for the specific delivery of compositions of the invention to cells (e.g., normal or diseased ovarian and/or breast cells) by administering polypeptides of the invention (e.g., ovarian and/or breast antigen polypeptides or anti-ovarian and/or breast antigen antibodies) that are associated with heterologous polypeptides or nucleic acids. In one example, the invention provides a method for delivering a therapeutic protein into the targeted cell (e.g., an aberrant ovarian and/or breast cell or ovarian and/or breast cancer cell). In another example, the invention provides a method for delivering a single stranded nucleic acid (e.g., antisense or ribozymes) or double stranded nucleic acid (e.g., DNA that can integrate into the cell's genome or replicate episomally and that can be transcribed) into the targeted cell.

[0426] In another embodiment, the invention provides a method for the specific destruction of cells (e.g., the destruction of aberrant ovarian and/or breast cells, including, but not limited to, ovarian and/or breast tumor cells) by administering polypeptides of the invention (e.g., ovarian and/or breast antigen polypeptides or fragments thereof, or anti-ovarian and/or breast antigen antibodies) in association with toxins or cytotoxic prodrugs.

[0427] By “toxin” is meant compounds that bind and activate endogenous cytotoxic effector systems, radioisotopes, holotoxins, modified toxins, catalytic subunits of toxins, cytotoxins (cytotoxic agents), or any molecules or enzymes not normally present in or on the surface of a cell that under defined conditions cause the cell's death. Toxins that may be used according to the methods of the invention include, but are not limited to, radioisotopes known in the art, compounds such as, for example, antibodies (or complement fixing containing portions thereof) that bind an inherent or induced endogenous cytotoxic effector system, thymidine kinase, endonuclease, RNAse, alpha toxin, ricin, abrin, Pseudomonas exotoxin A, diphtheria toxin, saporin, momordin, gelonin, pokeweed antiviral protein, alpha-sarcin and cholera toxin. “Toxin” also includes a cytostatic or cytocidal agent, a therapeutic agent or a radioactive metal ion, e.g., alpha-emitters such as, for example, ²¹³Bi, or other radioisotopes such as, for example, ¹⁰³Pd, ^{133 Xe,} ¹³¹I, ⁶⁸Ge, ⁵⁷Co, ⁶⁵Zn, ⁸⁵Sr, ³²P, ³⁵S, ⁹⁰Y, ¹⁵³Sm, ¹⁵³Gd, ¹⁶⁹Yb, ⁵¹Cr, ⁵⁴Mn, ⁷⁵Se, ¹¹³Sn, ⁹⁰Yttrium, ¹¹⁷Tin, ¹⁸⁶Rhenium, ¹⁶⁶Holmium, and ¹⁸⁸Rhenium; luminescent labels, such as luminol; and fluorescent labels, such as fluorescein and rhodamine, and biotin.

[0428] Techniques known in the art may be applied to label antibodies of the invention. Such techniques include, but are not limited to, the use of bifunctional conjugating agents (see e.g., U.S. Pat. Nos. 5,756,065; 5,714,631; 5,696,239; 5,652,361; 5,505,931; 5,489,425; 5,435,990; 5,428,139; 5,342,604; 5,274,119; 4,994,560; and 5,808,003; the contents of each of which are hereby incorporated by reference in its entirety). A cytotoxin or cytotoxic agent includes any agent that is detrimental to cells. Examples include paclitaxol, cytochalasin B, gramicidin D, ethidium bromide, emetine, mitomycin, etoposide, tenoposide, vincristine, vinblastine, colchicin, doxorubicin, daunorubicin, dihydroxy anthracin dione, mitoxantrone, mithramycin, actinomycin D, 1-dehydrotestosterone, glucocorticoids, procaine, tetracaine, lidocaine, propranolol, and puromycin and analogs or homologs thereof. Therapeutic agents include, but are not limited to, antimetabolites (e.g., methotrexate, 6-mercaptopurine, 6-thioguanine, cytarabine, 5-fluorouracil decarbazine), alkylating agents (e.g., mechlorethamine, thioepa chlorambucil, melphalan, carmustine (BSNU) and lomustine (CCNU), cyclothosphamide, busulfan, dibromomannitol, streptozotocin, mitomycin C, and cis-dichlorodiamine platinum (II) (DDP) cisplatin), anthracyclines (e.g., daunorubicin (formerly daunomycin) and doxorubicin), antibiotics (e.g., dactinomycin (formerly actinomycin), bleomycin, mithramycin, and anthramycin (AMC)), and anti-mitotic agents (e.g., vincristine and vinblastine).

[0429] By “cytotoxic prodrug” is meant a non-toxic compound that is converted by an enzyme, normally present in the cell, into a cytotoxic compound. Cytotoxic prodrugs that may be used according to the methods of the invention include, but are not limited to, glutamyl derivatives of benzoic acid mustard alkylating agent, phosphate derivatives of etoposide or mitomycin C, cytosine arabinoside, daunorubisin, and phenoxyacetamide derivatives of doxorubicin.

[0430] It will be appreciated that conditions caused by a decrease in the standard or normal level of an ovarian and/or breast antigen activity in an individual, particularly disorders of the ovaries and/or breast, can be treated by administration of an ovarian and/or breast antigen polypeptide (e.g., such as, for example, the complete ovarian and/or breast antigen polypeptide, the soluble form of the extracellular domain of an ovarian and/or breast antigen polypeptide, or cells expressing the complete protein) or agonist. Thus, the invention also provides a method of treatment of an individual in need of an increased level of ovarian and/or breast antigen activity comprising administering to such an individual a pharmaceutical composition comprising an amount of an isolated ovarian and/or breast antigen polypeptide of the invention, or agonist thereof (e.g., an agonistic anti-ovarian and/or breast antigen antibody), effective to increase the ovarian and/or breast antigen activity level in such an individual.

[0431] It will also be appreciated that conditions caused by a increase in the standard or normal level of ovarian and/or breast antigen activity in an individual, particularly disorders of the ovaries and/or breast, can be treated by administration of ovarian and/or breast antigen polypeptides (e.g., such as, for example, the complete ovarian and/or breast antigen polypeptide, the soluble form of the extracellular domain of an ovarian and/or breast antigen polypeptide, or cells expressing the complete protein) or antagonist (e.g., an antagonistic ovarian and/or breast antigen antibody). Thus, the invention also provides a method of treatment of an individual in need of an decreased level of ovarian and/or breast antigen activity comprising administering to such an individual a pharmaceutical composition comprising an amount of an isolated ovarian and/or breast antigen polypeptide of the invention, or antagonist thereof (e.g., an antagonistic anti-ovarian and/or breast antigen antibody), effective to decrease the ovarian and/or breast antigen activity level in such an individual.

[0432] More generally, polynucleotides, translation products and antibodies corresponding to this gene may be useful for the diagnosis, prognosis, prevention, and/or treatment of diseases and/or disorders associated with the following systems.

[0433] Reproductive System Disorders

[0434] The polynucleotides or polypeptides, or agonists or antagonists of the invention may be used for the diagnosis, treatment, or prevention of diseases and/or disorders of the reproductive system. Reproductive system disorders that can be treated by the compositions of the invention, include, but are not limited to, reproductive system injuries, infections, neoplastic disorders, congenital defects, and diseases or disorders which result in infertility, complications with pregnancy, labor, or parturition, and postpartum difficulties.

[0435] Reproductive system disorders and/or diseases include diseases and/or disorders of the testes, including, but not limited to, testicular atrophy, testicular feminization, cryptorchism (unilateral and bilateral), anorchia, ectopic testis, epididymitis and orchitis (typically resulting from infections such as, for example, gonorrhea, mumps, tuberculosis, and syphilis), testicular torsion, vasitis nodosa, germ cell tumors (e.g., seminomas, embryonal cell carcinomas, teratocarcinomas, choriocarcinomas, yolk sac tumors, and teratomas), stromal tumors (e.g., Leydig cell tumors), hydrocele, hematocele, varicocele, spermatocele, inguinal hernia, and disorders of sperm production (e.g., immotile cilia syndrome, aspermia, asthenozoospermia, azoospermia, oligospermia, and teratozoospermia).

[0436] Reproductive system disorders also include, but are not limited to, disorders of the prostate gland, such as acute non-bacterial prostatitis, chronic non-bacterial prostatitis, acute bacterial prostatitis, chronic bacterial prostatitis, prostatodystonia, prostatosis, granulomatous prostatitis, malacoplakia, benign prostatic hypertrophy or hyperplasia, and prostate neoplastic disorders, including adenocarcinomas, transitional cell carcinomas, ductal carcinomas, and squamous cell carcinomas.

[0437] Additionally, the compositions of the invention may be useful in the diagnosis, treatment, and/or prevention of disorders or diseases of the penis and urethra, including, but not limited to, inflammatory disorders, such as balanoposthitis, balanitis xerotica obliterans, phimosis, paraphimosis, syphilis, herpes simplex virus, gonorrhea, non-gonococcal urethritis, chlamydia, mycoplasma, trichomonas, HIV, AIDS, Reiter's syndrome, condyloma acuminatum, condyloma latum, and pearly penile papules; urethral abnormalities, such as hypospadias, epispadias, and phimosis; premalignant lesions, including Erythroplasia of Queyrat, Bowen's disease, Bowenoid paplosis, giant condyloma of Buscke-Lowenstein, and varrucous carcinoma; penile cancers, including squamous cell carcinomas, carcinoma in situ, verrucous carcinoma, and disseminated penile carcinoma; urethral neoplastic disorders, including penile urethral carcinoma, bulbomembranous urethral carcinoma, and prostatic urethral carcinoma; and erectile disorders, such as priapism, Peyronie's disease, erectile dysfunction, and impotence.

[0438] Moreover, diseases and/or disorders of the vas deferens include, but are not limited to, vasculititis and CBAVD (congenital bilateral absence of the vas deferens); additionally, the polynucleotides, polypeptides, and agonists or antagonists of the present invention may be used in the diagnosis, treatment, and/or prevention of diseases and/or disorders of the seminal vesicles, including but not limited to, hydatid disease, congenital chloride diarrhea, and polycystic kidney disease.

[0439] Other disorders and/or diseases of the male reproductive system that may be diagnosed, treated, and/or prevented with the compositions of the invention include, but are not limited to, Klinefelter's syndrome, Young's syndrome, premature ejaculation, diabetes mellitus, cystic fibrosis, Kartagener's syndrome, high fever, multiple sclerosis, and gynecomastia.

[0440] Further, the polynucleotides, polypeptides, and agonists or antagonists of the present invention may be used in the diagnosis, treatment, and/or prevention of diseases and/or disorders of the vagina and vulva, including, but not limited to, bacterial vaginosis, candida vaginitis, herpes simplex virus, chancroid, granuloma inguinale, lymphogranuloma venereum, scabies, human papillomavirus, vaginal trauma, vulvar trauma, adenosis, chlamydia vaginitis, gonorrhea, trichomonas vaginitis, condyloma acuminatum, syphilis, molluscum contagiosum, atrophic vaginitis, Paget's disease, lichen sclerosus, lichen planus, vulvodynia, toxic shock syndrome, vaginismus, vulvovaginitis, vulvar vestibulitis, and neoplastic disorders, such as squamous cell hyperplasia, clear cell carcinoma, basal cell carcinoma, melanomas, cancer of Bartholin's gland, and vulvar intraepithelial neoplasia.

[0441] Disorders and/or diseases of the uterus that may be diagnosed, treated, and/or prevented with the compositions of the invention include, but are not limited to, dysmenorrhea, retroverted uterus, endometriosis, fibroids, adenomyosis, anovulatory bleeding, amenorrhea, Cushing's syndrome, hydatidiform moles, Asherman's syndrome, premature menopause, precocious puberty, uterine polyps, dysfunctional uterine bleeding (e.g., due to aberrant hormonal signals), and neoplastic disorders, such as adenocarcinomas, keiomyosarcomas, and sarcomas. Additionally, the polypeptides, polynucleotides, or agonists or antagonists of the invention may be useful as a marker or detector of, as well as in the diagnosis, treatment, and/or prevention of congenital uterine abnormalities, such as bicornuate uterus, septate uterus, simple unicornuate uterus, unicornuate uterus with a noncavitary rudimentary horn, unicornuate uterus with a non-communicating cavitary rudimentary horn, unicornuate uterus with a communicating cavitary horn, arcuate uterus, uterine didelfus, and T-shaped uterus.

[0442] Ovarian diseases and/or disorders that may be diagnosed, treated, and/or prevented with the compositions of the invention include, but are not limited to, anovulation, polycystic ovary syndrome (Stein-Leventhal syndrome), ovarian cysts, ovarian hypofunction, ovarian insensitivity to gonadotropins, ovarian overproduction of androgens, right ovarian vein syndrome, amenorrhea, hirutism, and ovarian cancer (including, but not limited to, primary and secondary cancerous growth, Sertoli-Leydig tumors, endometriod carcinoma of the ovary, ovarian papillary serous adenocarcinoma, ovarian mucinous adenocarcinoma, and Ovarian Krukenberg tumors).

[0443] Cervical diseases and/or disorders that may be diagnosed, treated, and/or prevented with the compositions of the invention include, but are not limited to, cervicitis, chronic cervicitis, mucopurulent cervicitis, cervical dysplasia, cervical polyps, Nabothian cysts, cervical erosion, cervical incompetence, and cervical neoplasms (including, for example, cervical carcinoma, squamous metaplasia, squamous cell carcinoma, adenosquamous cell neoplasia, and columnar cell neoplasia).

[0444] Additionally, diseases and/or disorders of the reproductive system that may be diagnosed, treated, and/or prevented with the compositions of the invention include, but are not limited to, disorders and/or diseases of pregnancy, including miscarriage and stillbirth, such as early abortion, late abortion, spontaneous abortion, induced abortion, therapeutic abortion, threatened abortion, missed abortion, incomplete abortion, complete abortion, habitual abortion, missed abortion, and septic abortion; ectopic pregnancy, anemia, Rh incompatibility, vaginal bleeding during pregnancy, gestational diabetes, intrauterine growth retardation, polyhydramnios, HELLP syndrome, abruptio placentae, placenta previa, hyperemesis, preeclampsia, eclampsia, herpes gestationis, and urticaria of pregnancy. Additionally, the polynucleotides, polypeptides, and agonists or antagonists of the present invention may be used in the diagnosis, treatment, and/or prevention of diseases that can complicate pregnancy, including heart disease, heart failure, rheumatic heart disease, congenital heart disease, mitral valve prolapse, high blood pressure, anemia, kidney disease, infectious disease (e.g., rubella, cytomegalovirus, toxoplasmosis, infectious hepatitis, chlamydia, HIV, AIDS, and genital herpes), diabetes mellitus, Graves' disease, thyroiditis, hypothyroidism, Hashimoto's thyroiditis, chronic active hepatitis, cirrhosis of the liver, primary biliary cirrhosis, asthma, systemic lupus eryematosis, rheumatoid arthritis, myasthenia gravis, idiopathic thrombocytopenic purpura, appendicitis, ovarian cysts, gallbladder disorders, and obstruction of the intestine.

[0445] Complications associated with labor and parturition that may be diagnosed, treated, and/or prevented with the compositions of the invention include, but are not limited to, premature rupture of the membranes, pre-term labor, post-term pregnancy, postmaturity, labor that progresses too slowly, fetal distress (e.g., abnormal heart rate (fetal or maternal), breathing problems, and abnormal fetal position), shoulder dystocia, prolapsed umbilical cord, amniotic fluid embolism, and aberrant uterine bleeding.

[0446] Further, diseases and/or disorders of the postdelivery period, that may be diagnosed, treated, and/or prevented with the compositions of the invention, include, but are not limited to, endometritis, myometritis, parametritis, peritonitis, pelvic thrombophlebitis, pulmonary embolism, endotoxemia, pyelonephritis, saphenous thrombophlebitis, mastitis, cystitis, postpartum hemorrhage, and inverted uterus.

[0447] Other disorders and/or diseases of the female reproductive system that may be diagnosed, treated, and/or prevented by the polynucleotides, polypeptides, and agonists or antagonists of the present invention include, but are not limited to, Turner's syndrome, pseudohermaphroditism, premenstrual syndrome, pelvic inflammatory disease, pelvic congestion (vascular engorgement), frigidity, anorgasmia, dyspareunia, ruptured fallopian tube, and Mittelschmerz.

[0448] Immune Activity

[0449] Polynucleotides, polypeptides, antibodies, and/or agonists or antagonists of the present invention may be useful in treating, preventing, diagnosing and/or prognosing diseases, disorders, and/or conditions of the immune system, by, for example, activating or inhibiting the proliferation, differentiation, or mobilization (chemotaxis) of immune cells. Immune cells develop through a process called hematopoiesis, producing myeloid (platelets, red blood cells, neutrophils, and macrophages) and lymphoid (B and T lymphocytes) cells from pluripotent stem cells. The etiology of these immune diseases, disorders, and/or conditions may be genetic, somatic, such as cancer and some autoimmune diseases, acquired (e.g., by chemotherapy or toxins), or infectious. Moreover, polynucleotides, polypeptides, antibodies, and/or agonists or antagonists of the present invention can be used as a marker or detector of a particular immune system disease or disorder.

[0450] Polynucleotides, polypeptides, antibodies, and/or agonists or antagonists of the present invention may be useful in treating, preventing, diagnosing, and/or prognosing immunodeficiencies, including both congenital and acquired immunodeficiencies. Examples of B cell immunodeficiencies in which immunoglobulin levels B cell function and/or B cell numbers are decreased include: X-linked agammaglobulinemia (Bruton's disease), X-linked infantile agammaglobulinemia, X-linked immunodeficiency with hyper IgM, non X-linked immunodeficiency with hyper IgM, X-linked lymphoproliferative syndrome (XLP), agammaglobulinemia including congenital and acquired agammaglobulinemia, adult onset agammaglobulinemia, late-onset agammaglobulinemia, dysgammaglobulinemia, hypogammaglobulinemia, unspecified hypogammaglobulinemia, recessive agammaglobulinemia (Swiss type), Selective IgM deficiency, selective IgA deficiency, selective IgG subclass deficiencies, IgG subclass deficiency (with or without IgA deficiency), Ig deficiency with increased IgM, IgG and IgA deficiency with increased IgM, antibody deficiency with normal or elevated Igs, Ig heavy chain deletions, kappa chain deficiency, B cell lymphoproliferative disorder (BLPD), common variable immunodeficiency (CVID), common variable immunodeficiency (CVI) (acquired), and transient hypogammaglobulinemia of infancy.

[0451] In specific embodiments, ataxia-telangiectasia or conditions associated with ataxia-telangiectasia are treated, prevented, diagnosed, and/or prognosing using the polypeptides or polynucleotides of the invention, and/or agonists or antagonists thereof.

[0452] Examples of congenital immunodeficiencies in which T cell and/or B cell function and/or number is decreased include, but are not limited to: DiGeorge anomaly, severe combined immunodeficiencies (SCID) (including, but not limited to, X-linked SCID, autosomal recessive SCID, adenosine deaminase deficiency, purine nucleoside phosphorylase (PNP) deficiency, Class II MHC deficiency (Bare lymphocyte syndrome), Wiskott-Aldrich syndrome, and ataxia telangiectasia), thymic hypoplasia, third and fourth pharyngeal pouch syndrome, 22q11.2 deletion, chronic mucocutaneous candidiasis, natural killer cell deficiency (NK), idiopathic CD4+ T-lymphocytopenia, immunodeficiency with predominant T cell defect (unspecified), and unspecified immunodeficiency of cell mediated immunity.

[0453] In specific embodiments, DiGeorge anomaly or conditions associated with DiGeorge anomaly are treated, prevented, diagnosed, and/or prognosed using polypeptides or polynucleotides of the invention, or antagonists or agonists thereof.

[0454] Other immunodeficiencies that may be treated, prevented, diagnosed, and/or prognosed using polypeptides or polynucleotides of the invention, and/or agonists or antagonists thereof, include, but are not limited to, chronic granulomatous disease, Chediak-ligashi syndrome, myeloperoxidase deficiency, leukocyte glucose-6-phosphate dehydrogenase deficiency, X-linked lymphoproliferative syndrome (XLP), leukocyte adhesion deficiency, complement component deficiencies (including C1, C2, C3, C4, C5, C6, C7, C8 and/or C9 deficiencies), reticular dysgenesis, thymic alymphoplasia-aplasia, immunodeficiency with thymoma, severe congenital leukopenia, dysplasia with immunodeficiency, neonatal neutropenia, short limbed dwarfism, and Nezelof syndrome-combined immunodeficiency with Igs.

[0455] In a preferred embodiment, the immunodeficiencies and/or conditions associated with the immunodeficiencies recited above are treated, prevented, diagnosed and/or prognosed using polynucleotides, polypeptides, antibodies, and/or agonists or antagonists of the present invention.

[0456] In a preferred embodiment polynucleotides, polypeptides, antibodies, and/or agonists or antagonists of the present invention could be used as an agent to boost immunoresponsiveness among immunodeficient individuals. In specific embodiments, polynucleotides, polypeptides, antibodies, and/or agonists or antagonists of the present invention could be used as an agent to boost immunoresponsiveness among B cell and/or T cell immunodeficient individuals.

[0457] The polynucleotides, polypeptides, antibodies, and/or agonists or antagonists of the present invention may be useful in treating, preventing, diagnosing and/or prognosing autoimmune disorders. Many autoimmune disorders result from inappropriate recognition of self as foreign material by immune cells. This inappropriate recognition results in an immune response leading to the destruction of the host tissue. Therefore, the administration of polynucleotides and polypeptides of the invention that can inhibit an immune response, particularly the proliferation, differentiation, or chemotaxis of T-cells, may be an effective therapy in preventing autoimmune disorders.

[0458] Autoimmune diseases or disorders that may be treated, prevented, diagnosed and/or prognosed by polynucleotides, polypeptides, antibodies, and/or agonists or antagonists of the present invention include, but are not limited to, one or more of the following: systemic lupus erythematosus, rheumatoid arthritis, ankylosing spondylitis, multiple sclerosis, autoimmune thyroiditis, Hashimoto's thyroiditis, autoimmune hemolytic anemia, hemolytic anemia, thrombocytopenia, autoimmune thrombocytopenia purpura, autoimmune neonatal thrombocytopenia, idiopathic thrombocytopenia purpura, purpura (e.g., Henloch-Scoenlein purpura), autoimmunocytopenia, Goodpasture's syndrome, Pemphigus vulgaris, myasthenia gravis, Grave's disease (hyperthyroidism), and insulin-resistant diabetes mellitus.

[0459] Additional disorders that are likely to have an autoimmune component that may be treated, prevented, and/or diagnosed with the compositions of the invention include, but are not limited to, type II collagen-induced arthritis, antiphospholipid syndrome, dermatitis, allergic encephalomyelitis, myocarditis, relapsing polychondritis, rheumatic heart disease, neuritis, uveitis ophthalmia, polyendocrinopathies, Reiter's Disease, Stiff-Man Syndrome, autoimmune pulmonary inflammation, autism, Guillain-Barre Syndrome, insulin dependent diabetes mellitus, and autoimmune inflammatory eye disorders.

[0460] Additional disorders that are likely to have an autoimmune component that may be treated, prevented, diagnosed and/or prognosed with the compositions of the invention include, but are not limited to, scleroderma with anti-collagen antibodies (often characterized, e.g., by nucleolar and other nuclear antibodies), mixed connective tissue disease (often characterized, e.g., by antibodies to extractable nuclear antigens (e.g., ribonucleoprotein)), polymyositis (often characterized, e.g., by nonhistone ANA), pernicious anemia (often characterized, e.g., by antiparietal cell, microsomes, and intrinsic factor antibodies), idiopathic Addison's disease (often characterized, e.g., by humoral and cell-mediated adrenal cytotoxicity, infertility (often characterized, e.g., by antispermatozoal antibodies), glomerulonephritis (often characterized, e.g., by glomerular basement membrane antibodies or immune complexes), bullous pemphigoid (often characterized, e.g., by IgG and complement in basement membrane), Sjogren's syndrome (often characterized, e.g., by multiple tissue antibodies, and/or a specific nonhistone ANA (SS-B)), diabetes mellitus (often characterized, e.g., by cell-mediated and humoral islet cell antibodies), and adrenergic drug resistance (including adrenergic drug resistance with asthma or cystic fibrosis) (often characterized, e.g., by beta-adrenergic receptor antibodies).

[0461] Additional disorders that may have an autoimmune component that may be treated, prevented, diagnosed and/or prognosed with the compositions of the invention include, but are not limited to, chronic active hepatitis (often characterized, e.g., by smooth muscle antibodies), primary biliary cirrhosis (often characterized, e.g., by mitochondria antibodies), other endocrine gland failure (often characterized, e.g., by specific tissue antibodies in some cases), vitiligo (often characterized, e.g., by melanocyte antibodies), vasculitis (often characterized, e.g., by Ig and complement in vessel walls and/or low serum complement), post-MI (often characterized, e.g., by myocardial antibodies), cardiotomy syndrome (often characterized, e.g., by myocardial antibodies), urticaria (often characterized, e.g., by IgG and IgM antibodies to IgE), atopic dermatitis (often characterized, e.g., by IgG and IgM antibodies to IgE), asthma (often characterized, e.g., by IgG and IgM antibodies to IgE), and many other inflammatory, granulomatous, degenerative, and atrophic disorders.

[0462] In a preferred embodiment, the autoimmune diseases and disorders and/or conditions associated with the diseases and disorders recited above are treated, prevented, diagnosed and/or prognosed using for example, antagonists or agonists, polypeptides or polynucleotides, or antibodies of the present invention. In a specific preferred embodiment, rheumatoid arthritis is treated, prevented, and/or diagnosed using polynucleotides, polypeptides, antibodies, and/or agonists or antagonists of the present invention.

[0463] In another specific preferred embodiment, systemic lupus erythematosus is treated, prevented, and/or diagnosed using polynucleotides, polypeptides, antibodies, and/or agonists or antagonists of the present invention. In another specific preferred embodiment, idiopathic thrombocytopenia purpura is treated, prevented, and/or diagnosed using polynucleotides, polypeptides, antibodies, and/or agonists or antagonists of the present invention.

[0464] In another specific preferred embodiment IgA nephropathy is treated, prevented, and/or diagnosed using polynucleotides, polypeptides, antibodies, and/or agonists or antagonists of the present invention.

[0465] In a preferred embodiment, the autoimmune diseases and disorders and/or conditions associated with the diseases and disorders recited above are treated, prevented, diagnosed and/or prognosed using polynucleotides, polypeptides, antibodies, and/or agonists or antagonists of the present invention.

[0466] In preferred embodiments, polypeptides, antibodies, polynucleotides and/or agonists or antagonists of the present invention are used as a immunosuppressive agent(s).

[0467] Polynucleotides, polypeptides, antibodies, and/or agonists or antagonists of the present invention may be useful in treating, preventing, prognosing, and/or diagnosing diseases, disorders, and/or conditions of hematopoietic cells. Polynucleotides, polypeptides, antibodies, and/or agonists or antagonists of the present invention could be used to increase differentiation and proliferation of hematopoietic cells, including the pluripotent stem cells, in an effort to treat or prevent those diseases, disorders, and/or conditions associated with a decrease in certain (or many) types hematopoietic cells, including but not limited to, leukopenia, neutropenia, anemia, and thrombocytopenia. Alternatively, Polynucleotides, polypeptides, antibodies, and/or agonists or antagonists of the present invention could be used to increase differentiation and proliferation of hematopoietic cells, including the pluripotent stem cells, in an effort to treat or prevent those diseases, disorders, and/or conditions associated with an increase in certain (or many) types of hematopoietic cells, including but not limited to, histiocytosis.

[0468] Allergic reactions and conditions, such as asthma (particularly allergic asthma) or other respiratory problems, may also be treated, prevented, diagnosed and/or prognosed using polypeptides, antibodies, or polynucleotides of the invention, and/or agonists or antagonists thereof. Moreover, these molecules can be used to treat, prevent, prognose, and/or diagnose anaphylaxis, hypersensitivity to an antigenic molecule, or blood group incompatibility.

[0469] Additionally, polypeptides or polynucleotides of the invention, and/or agonists or antagonists thereof, may be used to treat, prevent, diagnose and/or prognose IgE-mediated allergic reactions. Such allergic reactions include, but are not limited to, asthma, rhinitis, and eczema. In specific embodiments, polynucleotides, polypeptides, antibodies, and/or agonists or antagonists of the present invention may be used to modulate IgE concentrations in vitro or in vivo.

[0470] Moreover, polynucleotides, polypeptides, antibodies, and/or agonists or antagonists of the present invention have uses in the diagnosis, prognosis, prevention, and/or treatment of inflammatory conditions. For example, since polypeptides, antibodies, or polynucleotides of the invention, and/or agonists or antagonists of the invention may inhibit the activation, proliferation and/or differentiation of cells involved in an inflammatory response, these molecules can be used to prevent and/or treat chronic and acute inflammatory conditions. Such inflammatory conditions include, but are not limited to, for example, inflammation associated with infection (e.g., septic shock, sepsis, or systemic inflammatory response syndrome), ischemia-reperfusion injury, endotoxin lethality, complement-mediated hyperacute rejection, nephritis, cytokine or chemokine induced lung injury, inflammatory bowel disease, Crohn's disease, over production of cytokines (e.g., TNF or IL-1.), respiratory disorders (e.g., asthma and allergy); gastrointestinal disorders (e.g., inflammatory bowel disease); cancers (e.g., gastric, ovarian, lung, bladder, liver, and breast); CNS disorders (e.g., multiple sclerosis; ischemic brain injury and/or stroke, traumatic brain injury, neurodegenerative disorders (e.g., Parkinson's disease and Alzheimer's disease); AIDS-related dementia; and prion disease); cardiovascular disorders (e.g., atherosclerosis, myocarditis, cardiovascular disease, and cardiopulmonary bypass complications); as well as many additional diseases, conditions, and disorders that are characterized by inflammation (e.g., hepatitis, rheumatoid arthritis, gout, trauma, pancreatitis, sarcoidosis, dermatitis, renal ischemia-reperfusion injury, Grave's disease, systemic lupus erythematosus, diabetes mellitus, and allogenic transplant rejection).

[0471] Because inflammation is a fundamental defense mechanism, inflammatory disorders can effect virtually any tissue of the body. Accordingly, polynucleotides, polypeptides, and antibodies of the invention, as well as agonists or antagonists thereof, have uses in the treatment of tissue-specific inflammatory disorders, including, but not limited to, adrenalitis, alveolitis, angiocholecystitis, appendicitis, balanitis, blepharitis, bronchitis, bursitis, carditis, cellulitis, cervicitis, cholecystitis, chorditis, cochlitis, colitis, conjunctivitis, cystitis, dermatitis, diverticulitis, encephalitis, endocarditis, esophagitis, eustachitis, fibrositis, folliculitis, gastritis, gastroenteritis, gingivitis, glossitis, hepatosplenitis, keratitis, labyrinthitis, laryngitis, lymphangitis, mastitis, media otitis, meningitis, metritis, mucitis, myocarditis, myosititis, myringitis, nephritis, neuritis, orchitis, osteochondritis, otitis, pericarditis, peritendonitis, peritonitis, pharyngitis, phlebitis, poliomyelitis, prostatitis, pulpitis, retinitis, rhinitis, salpingitis, scleritis, sclerochoroiditis, scrotitis, sinusitis, spondylitis, steatitis, stomatitis, synovitis, syringitis, tendonitis, tonsillitis, urethritis, and vaginitis.

[0472] In specific embodiments, polypeptides, antibodies, or polynucleotides of the invention, and/or agonists or antagonists thereof, are useful to diagnose, prognose, prevent, and/or treat organ transplant rejections and graft-versus-host disease. Organ rejection occurs by host immune cell destruction of the transplanted tissue through an immune response. Similarly, an immune response is also involved in GVHD, but, in this case, the foreign transplanted immune cells destroy the host tissues. Polypeptides, antibodies, or polynucleotides of the invention, and/or agonists or antagonists thereof, that inhibit an immune response, particularly the activation, proliferation, differentiation, or chemotaxis of T-cells, may be an effective therapy in preventing organ rejection or GVHD. In specific embodiments, polypeptides, antibodies, or polynucleotides of the invention, and/or agonists or antagonists thereof, that inhibit an immune response, particularly the activation, proliferation, differentiation, or chemotaxis of T-cells, may be an effective therapy in preventing experimental allergic and hyperacute xenograft rejection.

[0473] In other embodiments, polypeptides, antibodies, or polynucleotides of the invention, and/or agonists or antagonists thereof, are useful to diagnose, prognose, prevent, and/or treat immune complex diseases, including, but not limited to, serum sickness, post streptococcal glomerulonephritis, polyarteritis nodosa, and immune complex-induced vasculitis.

[0474] Polypeptides, antibodies, polynucleotides and/or agonists or antagonists of the invention can be used to treat, detect, and/or prevent infectious agents. For example, by increasing the immune response, particularly increasing the proliferation activation and/or differentiation of B and/or T cells, infectious diseases may be treated, detected, and/or prevented. The immune response may be increased by either enhancing an existing immune response, or by initiating a new immune response. Alternatively, polynucleotides, polypeptides, antibodies, and/or agonists or antagonists of the present invention may also directly inhibit the infectious agent (refer to section of application listing infectious agents, etc), without necessarily eliciting an immune response.

[0475] In another embodiment, polypeptides, antibodies, polynucleotides and/or agonists or antagonists of the present invention are used as a vaccine adjuvant that enhances immune responsiveness to an antigen. In a specific embodiment, polypeptides, antibodies, polynucleotides and/or agonists or antagonists of the present invention are used as an adjuvant to enhance tumor-specific immune responses.

[0476] In another specific embodiment, polypeptides, antibodies, polynucleotides and/or agonists or antagonists of the present invention are used as an adjuvant to enhance anti-viral immune responses. Anti-viral immune responses that may be enhanced using the compositions of the invention as an adjuvant, include virus and virus associated diseases or symptoms described herein or otherwise known in the art. In specific embodiments, the compositions of the invention are used as an adjuvant to enhance an immune response to a virus, disease, or symptom selected from the group consisting of: AIDS, meningitis, Dengue, EBV, and hepatitis (e.g., hepatitis B). In another specific embodiment, the compositions of the invention are used as an adjuvant to enhance an immune response to a virus, disease, or symptom selected from the group consisting of: HIV/AIDS, respiratory syncytial virus, Dengue, rotavirus, Japanese B encephalitis, influenza A and B, parainfluenza, measles, cytomegalovirus, rabies, Junin, Chikungunya, Rift Valley Fever, herpes simplex, and yellow fever.

[0477] In another specific embodiment, polypeptides, antibodies, polynucleotides and/or agonists or antagonists of the present invention are used as an adjuvant to enhance anti-bacterial or anti-fungal immune responses. Anti-bacterial or anti-fungal immune responses that may be enhanced using the compositions of the invention as an adjuvant, include bacteria or fungus and bacteria or fungus associated diseases or symptoms described herein or otherwise known in the art. In specific embodiments, the compositions of the invention are used as an adjuvant to enhance an immune response to a bacteria or fungus, disease, or symptom selected from the group consisting of: tetanus, Diphtheria, botulism, and meningitis type B.

[0478] In another specific embodiment, the compositions of the invention are used as an adjuvant to enhance an immune response to a bacteria or fungus, disease, or symptom selected from the group consisting of: Vibrio cholerae, Mycobacterium leprae, Salmonella typhi, Salmonella paratyphi, Meisseria meningitidis, Streptococcus pneumoniae, Group B streptococcus, Shigella spp., Enterotoxigenic Escherichia coli, Enterohemorrhagic E. coli, and Borrelia burgdorferi.

[0479] In another specific embodiment, polypeptides, antibodies, polynucleotides and/or agonists or antagonists of the present invention are used as an adjuvant to enhance anti-parasitic immune responses. Anti-parasitic immune responses that may be enhanced using the compositions of the invention as an adjuvant, include parasite and parasite associated diseases or symptoms described herein or otherwise known in the art. In specific embodiments, the compositions of the invention are used as an adjuvant to enhance an immune response to a parasite. In another specific embodiment, the compositions of the invention are used as an adjuvant to enhance an immune response to Plasmodium (malaria) or Leishmania.

[0480] In another specific embodiment, polypeptides, antibodies, polynucleotides and/or agonists or antagonists of the present invention may also be employed to treat infectious diseases including silicosis, sarcoidosis, and idiopathic pulmonary fibrosis; for example, by preventing the recruitment and activation of mononuclear phagocytes.

[0481] In another specific embodiment, polypeptides, antibodies, polynucleotides and/or agonists or antagonists of the present invention are used as an antigen for the generation of antibodies to inhibit or enhance immune mediated responses against polypeptides of the invention.

[0482] In one embodiment, polypeptides, antibodies, polynucleotides and/or agonists or antagonists of the present invention are administered to an animal (e.g., mouse, rat, rabbit, hamster, guinea pig, pigs, micro-pig, chicken, camel, goat, horse, cow, sheep, dog, cat, non-human primate, and human, most preferably human) to boost the immune system to produce increased quantities of one or more antibodies (e.g., IgG, IgA, IgM, and IgE), to induce higher affinity antibody production and immunoglobulin class switching (e.g., IgG, IgA, IgM, and IgE), and/or to increase an immune response.

[0483] In another specific embodiment, polypeptides, antibodies, polynucleotides and/or agonists or antagonists of the present invention are used as a stimulator of B cell responsiveness to pathogens.

[0484] In another specific embodiment, polypeptides, antibodies, polynucleotides and/or agonists or antagonists of the present invention are used as an activator of T cells.

[0485] In another specific embodiment, polypeptides, antibodies, polynucleotides and/or agonists or antagonists of the present invention are used as an agent that elevates the immune status of an individual prior to their receipt of immunosuppressive therapies.

[0486] In another specific embodiment, polypeptides, antibodies, polynucleotides and/or agonists or antagonists of the present invention are used as an agent to induce higher affinity antibodies.

[0487] In another specific embodiment, polypeptides, antibodies, polynucleotides and/or agonists or antagonists of the present invention are used as an agent to increase serum immunoglobulin concentrations.

[0488] In another specific embodiment, polypeptides, antibodies, polynucleotides and/or agonists or antagonists of the present invention are used as an agent to accelerate recovery of immunocompromised individuals.

[0489] In another specific embodiment, polypeptides, antibodies, polynucleotides and/or agonists or antagonists of the present invention are used as an agent to boost immunoresponsiveness among aged populations and/or neonates.

[0490] In another specific embodiment, polypeptides, antibodies, polynucleotides and/or agonists or antagonists of the present invention are used as an immune system enhancer prior to, during, or after bone marrow transplant and/or other transplants (e.g., allogeneic or xenogeneic organ transplantation). With respect to transplantation, compositions of the invention may be administered prior to, concomitant with, and/or after transplantation. In a specific embodiment, compositions of the invention are administered after transplantation, prior to the beginning of recovery of T-cell populations. In another specific embodiment, compositions of the invention are first administered after transplantation after the beginning of recovery of T cell populations, but prior to full recovery of B cell populations.

[0491] In another specific embodiment, polypeptides, antibodies, polynucleotides and/or agonists or antagonists of the present invention are used as an agent to boost immunoresponsiveness among individuals having an acquired loss of B cell function. Conditions resulting in an acquired loss of B cell function that may be ameliorated or treated by administering the polypeptides, antibodies, polynucleotides and/or agonists or antagonists thereof, include, but are not limited to, HIV Infection, AIDS, bone marrow transplant, and B cell chronic lymphocytic leukemia (CLL).

[0492] In another specific embodiment, polypeptides, antibodies, polynucleotides and/or agonists or antagonists of the present invention are used as an agent to boost immunoresponsiveness among individuals having a temporary immune deficiency. Conditions resulting in a temporary immune deficiency that may be ameliorated or treated by administering the polypeptides, antibodies, polynucleotides and/or agonists or antagonists thereof, include, but are not limited to, recovery from viral infections (e.g., influenza), conditions associated with malnutrition, recovery from infectious mononucleosis, or conditions associated with stress, recovery from measles, recovery from blood transfusion, and recovery from surgery.

[0493] In another specific embodiment, polypeptides, antibodies, polynucleotides and/or agonists or antagonists of the present invention are used as a regulator of antigen presentation by monocytes, dendritic cells, and/or B-cells. In one embodiment, polynucleotides, polypeptides, antibodies, and/or agonists or antagonists of the present invention enhance antigen presentation or antagonizes antigen presentation in vitro or in vivo. Moreover, in related embodiments, said enhancement or antagonism of antigen presentation may be useful as an anti-tumor treatment or to modulate the immune system.

[0494] In another specific embodiment, polypeptides, antibodies, polynucleotides and/or agonists or antagonists of the present invention are used as an agent to direct an individual's immune system towards development of a humoral response (i.e. TH2) as opposed to a TH1 cellular response.

[0495] In another specific embodiment, polypeptides, antibodies, polynucleotides and/or agonists or antagonists of the present invention are used as a means to induce tumor proliferation and thus make it more susceptible to anti-neoplastic agents. For example, multiple myeloma is a slowly dividing disease and is thus refractory to virtually all anti-neoplastic regimens. If these cells were forced to proliferate more rapidly their susceptibility profile would likely change.

[0496] In another specific embodiment, polypeptides, antibodies, polynucleotides and/or agonists or antagonists of the present invention are used as a stimulator of B cell production in pathologies such as AIDS, chronic lymphocyte disorder and/or Common Variable Immunodificiency.

[0497] In another specific embodiment, polypeptides, antibodies, polynucleotides and/or agonists or antagonists of the present invention are used as a therapy for generation and/or regeneration of lymphoid tissues following surgery, trauma or genetic defect. In another specific embodiment, polypeptides, antibodies, polynucleotides and/or agonists or antagonists of the present invention are used in the pretreatment of bone marrow samples prior to transplant.

[0498] In another specific embodiment, polypeptides, antibodies, polynucleotides and/or agonists or antagonists of the present invention are used as a gene-based therapy for genetically inherited disorders resulting in immuno-incompetence/immunodeficiency such as observed among SCID patients.

[0499] In another specific embodiment, polypeptides, antibodies, polynucleotides and/or agonists or antagonists of the present invention are used as a means of activating monocytes/macrophages to defend against parasitic diseases that effect monocytes such as Leishmania.

[0500] In another specific embodiment, polypeptides, antibodies, polynucleotides and/or agonists or antagonists of the present invention are used as a means of regulating secreted cytokines that are elicited by polypeptides of the invention.

[0501] In another embodiment, polypeptides, antibodies, polynucleotides and/or agonists or antagonists of the present invention are used in one or more of the applications decribed herein, as they may apply to veterinary medicine.

[0502] In another specific embodiment, polypeptides, antibodies, polynucleotides and/or agonists or antagonists of the present invention are used as a means of blocking various aspects of immune responses to foreign agents or self. Examples of diseases or conditions in which blocking of certain aspects of immune responses may be desired include autoimmune disorders such as lupus, and arthritis, as well as immunoresponsiveness to skin allergies, inflammation, bowel disease, injury and diseases/disorders associated with pathogens.

[0503] In another specific embodiment, polypeptides, antibodies, polynucleotides and/or agonists or antagonists of the present invention are used as a therapy for preventing the B cell proliferation and Ig secretion associated with autoimmune diseases such as idiopathic thrombocytopenic purpura, systemic lupus erythematosus and multiple sclerosis.

[0504] In another specific embodiment, polypeptides, antibodies, polynucleotides and/or agonists or antagonists of the present invention are used as a inhibitor of B and/or T cell migration in endothelial cells. This activity disrupts tissue architecture or cognate responses and is useful, for example in disrupting immune responses, and blocking sepsis.

[0505] In another specific embodiment, polypeptides, antibodies, polynucleotides and/or agonists or antagonists of the present invention are used as a therapy for chronic hypergammaglobulinemia evident in such diseases as monoclonal gammopathy of undetermined significance (MGUS), Waldenstrom's disease, related idiopathic monoclonal gammopathies, and plasmacytomas.

[0506] In another specific embodiment, polypeptides, antibodies, polynucleotides and/or agonists or antagonists of the present invention may be employed for instance to inhibit polypeptide chemotaxis and activation of macrophages and their precursors, and of neutrophils, basophils, B lymphocytes and some T-cell subsets, e.g., activated and CD8 cytotoxic T cells and natural killer cells, in certain autoimmune and chronic inflammatory and infective diseases. Examples of autoimmune diseases are described herein and include multiple sclerosis, and insulin-dependent diabetes.

[0507] The polypeptides, antibodies, polynucleotides and/or agonists or antagonists of the present invention may also be employed to treat idiopathic hyper-eosinophilic syndrome by, for example, preventing eosinophil production and migration.

[0508] In another specific embodiment, polypeptides, antibodies, polynucleotides and/or agonists or antagonists of the present invention are used to enhance or inhibit complement mediated cell lysis.

[0509] In another specific embodiment, polypeptides, antibodies, polynucleotides and/or agonists or antagonists of the present invention are used to enhance or inhibit antibody dependent cellular cytotoxicity.

[0510] In another specific embodiment, polypeptides, antibodies, polynucleotides and/or agonists or antagonists of the present invention may also be employed for treating atherosclerosis, for example, by preventing monocyte infiltration in the artery wall.

[0511] In another specific embodiment, polypeptides, antibodies, polynucleotides and/or agonists or antagonists of the present invention may be employed to treat adult respiratory distress syndrome (ARDS).

[0512] In another specific embodiment, polypeptides, antibodies, polynucleotides and/or agonists or antagonists of the present invention may be useful for stimulating wound and tissue repair, stimulating angiogenesis, and/or stimulating the repair of vascular or lymphatic diseases or disorders. Additionally, agonists and antagonists of the invention may be used to stimulate the regeneration of mucosal surfaces.

[0513] In a specific embodiment, polynucleotides or polypeptides, and/or agonists thereof are used to diagnose, prognose, treat, and/or prevent a disorder characterized by primary or acquired immunodeficiency, deficient serum immunoglobulin production, recurrent infections, and/or immune system dysfunction. Moreover, polynucleotides or polypeptides, and/or agonists thereof may be used to treat or prevent infections of the joints, bones, skin, and/or parotid glands, blood-borne infections (e.g., sepsis, meningitis, septic arthritis, and/or osteomyelitis), autoimmune diseases (e.g., those disclosed herein), inflammatory disorders, and malignancies, and/or any disease or disorder or condition associated with these infections, diseases, disorders and/or malignancies) including, but not limited to, CVID, other primary immune deficiencies, HIV disease, CLL, recurrent bronchitis, sinusitis, otitis media, conjunctivitis, pneumonia, hepatitis, meningitis, herpes zoster (e.g., severe herpes zoster), and/or pneumocystis carnii. Other diseases and disorders that may be prevented, diagnosed, prognosed, and/or treated with polynucleotides or polypeptides, and/or agonists of the present invention include, but are not limited to, HIV infection, HTLV-BLV infection, lymphopenia, phagocyte bactericidal dysfunction anemia, thrombocytopenia, and hemoglobinuria.

[0514] In another embodiment, polynucleotides, polypeptides, antibodies, and/or agonists or antagonists of the present invention are used to treat, and/or diagnose an individual having common variable immunodeficiency disease (“CVID”; also known as “acquired agammaglobulinemia” and “acquired hypogammaglobulinemia”) or a subset of this disease.

[0515] In a specific embodiment, polynucleotides, polypeptides, antibodies, and/or agonists or antagonists of the present invention may be used to diagnose, prognose, prevent, and/or treat cancers or neoplasms including immune cell or immune tissue-related cancers or neoplasms. Examples of cancers or neoplasms that may be prevented, diagnosed, or treated by polynucleotides, polypeptides, antibodies, and/or agonists or antagonists of the present invention include, but are not limited to, acute myelogenous leukemia, chronic myelogenous leukemia, Hodgkin's disease, non-Hodgkin's lymphoma, acute lymphocytic anemia (ALL) Chronic lymphocyte leukemia, plasmacytomas, multiple myeloma, Burkitt's lymphoma, EBV-transformed diseases, and/or diseases and disorders described in the section entitled “Hyperproliferative Disorders” elsewhere herein.

[0516] In another specific embodiment, polypeptides, antibodies, polynucleotides and/or agonists or antagonists of the present invention are used as a therapy for decreasing cellular proliferation of Large B-cell Lymphomas.

[0517] In another specific embodiment, polypeptides, antibodies, polynucleotides and/or agonists or antagonists of the present invention are used as a means of decreasing the involvement of B cells and Ig associated with Chronic Myelogenous Leukemia.

[0518] In specific embodiments, the compositions of the invention are used as an agent to boost immunoresponsiveness among B cell immunodeficient individuals, such as, for example, an individual who has undergone a partial or complete splenectomy.

[0519] Antagonists of the invention include, for example, binding and/or inhibitory antibodies, antisense nucleic acids, ribozymes or soluble forms of the polypeptides of the present invention (e.g., Fc fusion protein; see, e.g., Example 9). Agonists of the invention include, for example, binding or stimulatory antibodies, and soluble forms of the polypeptides (e.g., Fc fusion proteins; see, e.g., Example 9). Polypeptides, antibodies, polynucleotides and/or agonists or antagonists of the present invention may be employed in a composition with a pharmaceutically acceptable carrier, e.g., as described herein.

[0520] In another embodiment, polypeptides, antibodies, polynucleotides and/or agonists or antagonists of the present invention are administered to an animal (including, but not limited to, those listed above, and also including transgenic animals) incapable of producing functional endogenous antibody molecules or having an otherwise compromised endogenous immune system, but which is capable of producing human immunoglobulin molecules by means of a reconstituted or partially reconstituted immune system from another animal (see, e.g., published PCT Application Nos. WO98/24893, WO/9634096, WO/9633735, and WO/9110741). Administration of polypeptides, antibodies, polynucleotides and/or agonists or antagonists of the present invention to such animals is useful for the generation of monoclonal antibodies against the polypeptides, antibodies, polynucleotides and/or agonists or antagonists of the present invention.

[0521] Blood-Related Disorders

[0522] The polynucleotides, polypeptides, antibodies, and/or agonists or antagonists of the present invention may be used to modulate hemostatic (the stopping of bleeding) or thrombolytic (clot dissolving) activity. For example, by increasing hemostatic or thrombolytic activity, polynucleotides or polypeptides, and/or agonists or antagonists of the present invention could be used to treat or prevent blood coagulation diseases, disorders, and/or conditions (e.g., afibrinogenemia, factor deficiencies, hemophilia), blood platelet diseases, disorders, and/or conditions (e.g., thrombocytopenia), or wounds resulting from trauma, surgery, or other causes. Alternatively, polynucleotides, polypeptides, antibodies, and/or agonists or antagonists of the present invention that can decrease hemostatic or thrombolytic activity could be used to inhibit or dissolve clotting. These molecules could be important in the treatment or prevention of heart attacks (infarction), strokes, or scarring.

[0523] In specific embodiments, the polynucleotides, polypeptides, antibodies, and/or agonists or antagonists of the present invention may be used to prevent, diagnose, prognose, and/or treat thrombosis, arterial thrombosis, venous thrombosis, thromboembolism, pulmonary embolism, atherosclerosis, myocardial infarction, transient ischemic attack, unstable angina. In specific embodiments, the polynucleotides, polypeptides, antibodies, and/or agonists or antagonists of the present invention may be used for the prevention of occulsion of saphenous grafts, for reducing the risk of periprocedural thrombosis as might accompany angioplasty procedures, for reducing the risk of stroke in patients with atrial fibrillation including nonrheumatic atrial fibrillation, for reducing the risk of embolism associated with mechanical heart valves and or mitral valves disease. Other uses for the polynucleotides, polypeptides, antibodies, and/or agonists or antagonists of the present invention, include, but are not limited to, the prevention of occlusions in extrcorporeal devices (e.g., intravascular canulas, vascular access shunts in hemodialysis patients, hemodialysis machines, and cardiopulmonary bypass machines).

[0524] The polynucleotides, polypeptides, antibodies, and/or agonists or antagonists of the present invention may be used to modulate hematopoietic activity (the formation of blood cells). For example, the polynucleotides, polypeptides, antibodies, and/or agonists or antagonists of the present invention may be used to increase the quantity of all or subsets of blood cells, such as, for example, erythrocytes, lymphocytes (B or T cells), myeloid cells (e.g., basophils, eosinophils, neutrophils, mast cells, macrophages) and platelets. The ability to decrease the quantity of blood cells or subsets of blood cells may be useful in the prevention, detection, diagnosis and/or treatment of anemias and leukopenias described below. Alternatively, the polynucleotides, polypeptides, antibodies, and/or agonists or antagonists of the present invention may be used to decrease the quantity of all or subsets of blood cells, such as, for example, erythrocytes, lymphocytes (B or T cells), myeloid cells (e.g., basophils, eosinophils, neutrophils, mast cells, macrophages) and platelets. The ability to decrease the quantity of blood cells or subsets of blood cells may be useful in the prevention, detection, diagnosis and/or treatment of leukocytoses, such as, for example eosinophilia.

[0525] The polynucleotides, polypeptides, antibodies, and/or agonists or antagonists of the present invention may be used to prevent, treat, or diagnose blood dyscrasia.

[0526] Anemias are conditions in which the number of red blood cells or amount of hemoglobin (the protein that carries oxygen) in them is below normal. Anemia may be caused by excessive bleeding, decreased red blood cell production, or increased red blood cell destruction (hemolysis). The polynucleotides, polypeptides, antibodies, and/or agonists or antagonists of the present invention may be useful in treating, preventing, and/or diagnosing anemias. Anemias that may be treated prevented or diagnosed by the polynucleotides, polypeptides, antibodies, and/or agonists or antagonists of the present invention include iron deficiency anemia, hypochromic anemia, microcytic anemia, chlorosis, hereditary siderob;astic anemia, idiopathic acquired sideroblastic anemia, red cell aplasia, megaloblastic anemia (e.g., pernicious anemia, (vitamin B12 deficiency) and folic acid deficiency anemia), aplastic anemia, hemolytic anemias (e.g., autoimmune helolytic anemia, microangiopathic hemolytic anemia, and paroxysmal nocturnal hemoglobinuria). The polynucleotides, polypeptides, antibodies, and/or agonists or antagonists of the present invention may be useful in treating, preventing, and/or diagnosing anemias associated with diseases including but not limited to, anemias associated with systemic lupus erythematosus, cancers, lymphomas, chronic renal disease, and enlarged spleens. The polynucleotides, polypeptides, antibodies, and/or agonists or antagonists of the present invention may be useful in treating, preventing, and/or diagnosing anemias arising from drug treatments such as anemias associated with methyldopa, dapsone, and/or sulfadrugs. Additionally, rhe polynucleotides, polypeptides, antibodies, and/or agonists or antagonists of the present invention may be useful in treating, preventing, and/or diagnosing anemias associated with abnormal red blood cell architecture including but not limited to, hereditary spherocytosis, hereditary elliptocytosis, glucose-6-phosphate dehydrogenase deficiency, and sickle cell anemia.

[0527] The polynucleotides, polypeptides, antibodies, and/or agonists or antagonists of the present invention may be useful in treating, preventing, and/or diagnosing hemoglobin abnormalities, (e.g., those associated with sickle cell anemia, hemoglobin C disease, hemoglobin S-C disease, and hemoglobin E disease). Additionally, the polynucleotides, polypeptides, antibodies, and/or agonists or antagonists of the present invention may be useful in diagnosing, prognosing, preventing, and/or treating thalassemias, including, but not limited to major and minor forms of alpha-thalassemia and beta-thalassemia.

[0528] In another embodiment, the polynucleotides, polypeptides, antibodies, and/or agonists or antagonists of the present invention may be useful in diagnosing, prognosing, preventing, and/or treating bleeding disorders including, but not limited to, thrombocytopenia (e.g., idiopathic thrombocytopenic purpura, and thrombotic thrombocytopenic purpura), Von Willebrand's disease, hereditary platelet disorders (e.g., storage pool disease such as Chediak-Higashi and Hermansky-Pudlak syndromes, thromboxane A2 dysfunction, thromboasthenia, and Bernard-Soulier syndrome), hemolytic-uremic syndrome, hemophelias such as hemophelia A or Factor VII deficiency and Christmas disease or Factor IX deficiency, Hereditary Hemorhhagic Telangiectsia, also known as Rendu-Osler-Weber syndrome, allergic purpura (Henoch Schonlein purpura) and disseminated intravascular coagulation.

[0529] The effect of the polynucleotides, polypeptides, antibodies, and/or agonists or antagonists of the present invention on the clotting time of blood may be monitored using any of the clotting tests known in the art including, but not limited to, whole blood partial thromboplastin time (PTT), the activated partial thromboplastin time (aPTT), the activated clotting time (ACT), the recalcified activated clotting time, or the Lee-White Clotting time.

[0530] Several diseases and a variety of drugs can cause platelet dysfunction. Thus, in a specific embodiment, the polynucleotides, polypeptides, antibodies, and/or agonists or antagonists of the present invention may be useful in diagnosing, prognosing, preventing, and/or treating acquired platelet dysfunction such as platelet dysfunction accompanying kidney failure, leukemia, multiple myeloma, cirrhosis of the liver, and systemic lupus erythematosus as well as platelet dysfunction associated with drug treatments, including treatment with aspirin, ticlopidine, nonsteroidal anti-inflammatory drugs (used for arthritis, pain, and sprains), and penicillin in high doses.

[0531] In another embodiment, the polynucleotides, polypeptides, antibodies, and/or agonists or antagonists of the present invention may be useful in diagnosing, prognosing, preventing, and/or treating diseases and disorders characterized by or associated with increased or decreased numbers of white blood cells. Leukopenia occurs when the number of white blood cells decreases below normal. Leukopenias include, but are not limited to, neutropenia and lymphocytopenia. An increase in the number of white blood cells compared to normal is known as leukocytosis. The body generates increased numbers of white blood cells during infection. Thus, leukocytosis may simply be a normal physiological parameter that reflects infection. Alternatively, leukocytosis may be an indicator of injury or other disease such as cancer. Leokocytoses, include but are not limited to, eosinophilia, and accumulations of macrophages. In specific embodiments, the polynucleotides, polypeptides, antibodies, and/or agonists or antagonists of the present invention may be useful in diagnosing, prognosing, preventing, and/or treating leukopenia. In other specific embodiments, the polynucleotides, polypeptides, antibodies, and/or agonists or antagonists of the present invention may be useful in diagnosing, prognosing, preventing, and/or treating leukocytosis

[0532] Leukopenia may be a generalized decreased in all types of white blood cells, or may be a specific depletion of particular types of white blood cells. Thus, in specific embodiments, the polynucleotides, polypeptides, antibodies, and/or agonists or antagonists of the present invention may be useful in diagnosing, prognosing, preventing, and/or treating decreases in neutrophil numbers, known as neutropenia. Neutropenias that may be diagnosed, prognosed, prevented, and/or treated by the polynucleotides, polypeptides, antibodies, and/or agonists or antagonists of the present invention include, but are not limited to, infantile genetic agranulocytosis, familial neutropenia, cyclic neutropenia, neutropenias resulting from or associated with dietary deficiencies (e.g., vitamin B 12 deficiency or folic acid deficiency), neutropenias resulting from or associated with drug treatments (e.g., antibiotic regimens such as penicillin treatment, sulfonamide treatment, anticoagulant treatment, anticonvulsant drugs, anti-thyroid drugs, and cancer chemotherapy), and neutropenias resulting from increased neutrophil destruction that may occur in association with some bacterial or viral infections, allergic disorders, autoimmune diseases, conditions in which an individual has an enlarged spleen (e.g., Felty syndrome, malaria and sarcoidosis), and some drug treatment regimens.

[0533] The polynucleotides, polypeptides, antibodies, and/or agonists or antagonists of the present invention may be useful in diagnosing, prognosing, preventing, and/or treating lymphocytopenias (decreased numbers of B and/or T lymphocytes), including, but not limited lymphocytopenias resulting from or associated with stress, drug treatments (e.g., drug treatment with corticosteroids, cancer chemotherapies, and/or radiation therapies), AIDS infection and/or other diseases such as, for example, cancer, rheumatoid arthritis, systemic lupus erythematosus, chronic infections, some viral infections and/or hereditary disorders (e.g., DiGeorge syndrome, Wiskott-Aldrich Syndome, severe combined immunodeficiency, ataxia telangiectsia).

[0534] The polynucleotides, polypeptides, antibodies, and/or agonists or antagonists of the present invention may be useful in diagnosing, prognosing, preventing, and/or treating diseases and disorders associated with macrophage numbers and/or macrophage function including, but not limited to, Gaucher's disease, Niemann-Pick disease, Letterer-Siwe disease and Hand-Schuller-Christian disease.

[0535] In another embodiment, the polynucleotides, polypeptides, antibodies, and/or agonists or antagonists of the present invention may be useful in diagnosing, prognosing, preventing, and/or treating diseases and disorders associated with eosinophil numbers and/or eosinophil function including, but not limited to, idiopathic hypereosinophilic syndrome, eosinophilia-myalgia syndrome, and Hand-Schuller-Christian disease.

[0536] In yet another embodiment, the polynucleotides, polypeptides, antibodies, and/or agonists or antagonists of the present invention may be useful in diagnosing, prognosing, preventing, and/or treating leukemias and lymphomas including, but not limited to, acute lymphocytic (lymphpblastic) leukemia (ALL), acute myeloid (myelocytic, myelogenous, myeloblastic, or myelomonocytic) leukemia, chronic lymphocytic leukemia (e.g., B cell leukemias, T cell leukemias, Sezary syndrome, and Hairy cell leukenia), chronic myelocytic (myeloid, myelogenous, or granulocytic) leukemia, Hodgkin's lymphoma, non-hodgkin's lymphoma, Burkitt's lymphoma, and mycosis fungoides.

[0537] In other embodiments, the polynucleotides, polypeptides, antibodies, and/or agonists or antagonists of the present invention may be useful in diagnosing, prognosing, preventing, and/or treating diseases and disorders of plasma cells including, but not limited to, plasma cell dyscrasias, monoclonal gammaopathies, monoclonal gammopathies of undetermined significance, multiple myeloma, macroglobulinemia, Waldenstrom's macroglobulinemia, cryoglobulinemia, and Raynaud's phenomenon.

[0538] In other embodiments, the polynucleotides, polypeptides, antibodies, and/or agonists or antagonists of the present invention may be useful in treating, preventing, and/or diagnosing myeloproliferative disorders, including but not limited to, polycythemia vera, relative polycythemia, secondary polycythemia, myelofibrosis, acute myelofibrosis, agnogenic myelod metaplasia, thrombocythemia, (including both primary and seconday thrombocythemia) and chronic myelocytic leukemia.

[0539] In other embodiments, the polynucleotides, polypeptides, antibodies, and/or agonists or antagonists of the present invention may be useful as a treatment prior to surgery, to increase blood cell production.

[0540] In other embodiments, the polynucleotides, polypeptides, antibodies, and/or agonists or antagonists of the present invention may be useful as an agent to enhance the migration, phagocytosis, superoxide production, antibody dependent cellular cytotoxicity of neutrophils, eosionophils and macrophages.

[0541] In other embodiments, the polynucleotides, polypeptides, antibodies, and/or agonists or antagonists of the present invention may be useful as an agent to increase the number of stem cells in circulation prior to stem cells pheresis. In another specific embodiment, the polynucleotides, polypeptides, antibodies, and/or agonists or antagonists of the present invention may be useful as an agent to increase the number of stem cells in circulation prior to platelet pheresis.

[0542] In other embodiments, the polynucleotides, polypeptides, antibodies, and/or agonists or antagonists of the present invention may be useful as an agent to increase cytokine production.

[0543] In other embodiments, the polynucleotides, polypeptides, antibodies, and/or agonists or antagonists of the present invention may be useful in preventing, diagnosing, and/or treating primary hematopoietic disorders.

[0544] Hyperproliferative Disorders

[0545] Breast and ovarian associated polynucleotides or polypeptides, or agonists or antagonists thereof, can be used to treat, prevent, diagnose and/or prognose hyperproliferative diseases, disorders, and/or conditions, including neoplasms.

[0546] In a specific embodiment, breast and ovarian associated polynucleotides or polypeptides, or agonists or antagonists thereof, can be used to treat, prevent, and/or diagnose hyperproliferative diseases, disorders, and/or conditions of the breast and ovaries.

[0547] In a preferred embodiment, breast and ovarian associated polynucleotides or polypeptides, or agonists or antagonists thereof, can be used to treat, prevent, and/or diagnose breast and ovarian neoplasms.

[0548] Breast and ovarian associated polynucleotides or polypeptides, or agonists or antagonists of the invention, may inhibit the proliferation of the disorder through direct or indirect interactions. Alternatively, breast and ovarian associated polynucleotides or polypeptides, or agonists or antagonists thereof, may proliferate other cells, which can inhibit the hyperproliferative disorder.

[0549] For example, by increasing an immune response, particularly increasing antigenic qualities of the hyperproliferative disorder or by proliferating, differentiating, or mobilizing T-cells, hyperproliferative diseases, disorders, and/or conditions can be treated, prevented, and/or diagnosed. This immune response may be increased by either enhancing an existing immune response, or by initiating a new immune response. Alternatively, decreasing an immune response may also be a method of treating, preventing, and/or diagnosing hyperproliferative diseases, disorders, and/or conditions, such as a chemotherapeutic agent.

[0550] Examples of hyperproliferative diseases, disorders, and/or conditions that can be treated, prevented, and/or diagnosed by breast and ovarian associated polynucleotides or polypeptides, or agonists or antagonists thereof, include, but are not limited to neoplasms located in the: prostate, colon, abdomen, bone, breast, digestive system, liver, pancreas, peritoneum, endocrine glands (adrenal, parathyroid, pituitary, testicles, ovary, thymus, thyroid), eye, head and neck, nervous (central and peripheral), lymphatic system, pelvic, skin, soft tissue, spleen, thoracic, and urogenital.

[0551] Similarly, other hyperproliferative disorders can also be treated or detected by polynucleotides or polypeptides, or agonists or antagonists of the present invention. Examples of such hyperproliferative disorders include, but are not limited to: Acute Childhood Lymphoblastic Leukemia, Acute Lymphoblastic Leukemia, Acute Lymphocytic Leukemia, Acute Myeloid Leukemia, Adrenocortical Carcinoma, Adult (Primary) Hepatocellular Cancer, Adult (Primary) Liver Cancer, Adult Acute Lymphocytic Leukemia, Adult Acute Myeloid Leukemia, Adult Hodgkin's Disease, Adult Hodgkin's Lymphoma, Adult Lymphocytic Leukemia, Adult Non-Hodgkin's Lymphoma, Adult Primary Liver Cancer, Adult Soft Tissue Sarcoma, AIDS-Related Lymphoma, AIDS-Related Malignancies, Anal Cancer, Astrocytoma, Bile Duct Cancer, Bladder Cancer, Bone Cancer, Brain Stem Glioma, Brain Tumors, Breast Cancer, Cancer of the Renal Pelvis and Ureter, Central Nervous System (Primary) Lymphoma, Central Nervous System Lymphoma, Cerebellar Astrocytoma, Cerebral Astrocytoma, Cervical Cancer, Childhood (Primary) Hepatocellular Cancer, Childhood (Primary) Liver Cancer, Childhood Acute Lymphoblastic Leukemia, Childhood Acute Myeloid Leukemia, Childhood Brain Stem Glioma, Childhood Cerebellar Astrocytoma, Childhood Cerebral Astrocytoma, Childhood Extracranial Germ Cell Tumors, Childhood Hodgkin's Disease, Childhood Hodgkin's Lymphoma, Childhood Hypothalamic and Visual Pathway Glioma, Childhood Lymphoblastic Leukemia, Childhood Medulloblastoma, Childhood Non-Hodgkin's Lymphoma, Childhood Pineal and Supratentorial Primitive Neuroectodermal Tumors, Childhood Primary Liver Cancer, Childhood Rhabdomyosarcoma, Childhood Soft Tissue Sarcoma, Childhood Visual Pathway and Hypothalamic Glioma, Chronic Lymphocytic Leukemia, Chronic Myelogenous Leukemia, Colon Cancer, Cutaneous T-Cell Lymphoma, Endocrine Pancreas Islet Cell Carcinoma, Endometrial Cancer, Ependymoma, Epithelial Cancer, Esophageal Cancer, Ewing's Sarcoma and Related Tumors, Exocrine Pancreatic Cancer, Extracranial Germ Cell Tumor, Extragonadal Germ Cell Tumor, Extrahepatic Bile Duct Cancer, Eye Cancer, Female Breast Cancer, Gaucher's Disease, Gallbladder Cancer, Gastric Cancer, Gastrointestinal Carcinoid Tumor, Gastrointestinal Tumors, Germ Cell Tumors, Gestational Trophoblastic Tumor, Hairy Cell Leukemia, Head and Neck Cancer, Hepatocellular Cancer, Hodgkin's Disease, Hodgkin's Lymphoma, Hypergammaglobulinemia, Hypopharyngeal Cancer, Intestinal Cancers, Intraocular Melanoma, Islet Cell Carcinoma, Islet Cell Pancreatic Cancer, Kaposi's Sarcoma, Kidney Cancer, Laryngeal Cancer, Lip and Oral Cavity Cancer, Liver Cancer, Lung Cancer, Lymphoproliferative Disorders, Macroglobulinemia, Male Breast Cancer, Malignant Mesothelioma, Malignant Thymoma, Medulloblastoma, Melanoma, Mesothelioma, Metastatic Occult Primary Squamous Neck Cancer, Metastatic Primary Squamous Neck Cancer, Metastatic Squamous Neck Cancer, Multiple Myeloma, Multiple Myeloma/Plasma Cell Neoplasm, Myelodysplastic Syndrome, Myelogenous Leukemia, Myeloid Leukemia, Myeloproliferative Disorders, Nasal Cavity and Paranasal Sinus Cancer, Nasopharyngeal Cancer, Neuroblastoma, Non-Hodgkin's Lymphoma During Pregnancy, Nonmelanoma Skin Cancer, Non-Small Cell Lung Cancer, Occult Primary Metastatic Squamous Neck Cancer, Oropharyngeal Cancer, Osteo-/Malignant Fibrous Sarcoma, Osteosarcoma/Malignant Fibrous Histiocytoma, Osteosarcoma/Malignant Fibrous Histiocytoma of Bone, Ovarian Epithelial Cancer, Ovarian Germ Cell Tumor, Ovarian Low Malignant Potential Tumor, Pancreatic Cancer, Paraproteinemias, Purpura, Parathyroid Cancer, Penile Cancer, Pheochromocytoma, Pituitary Tumor, Plasma Cell Neoplasm/Multiple Myeloma, Primary Central Nervous System Lymphoma, Primary Liver Cancer, Prostate Cancer, Rectal Cancer, Renal Cell Cancer, Renal Pelvis and Ureter Cancer, Retinoblastoma, Rhabdomyosarcoma, Salivary Gland Cancer, Sarcoidosis Sarcomas, Sezary Syndrome, Skin Cancer, Small Cell Lung Cancer, Small Intestine Cancer, Soft Tissue Sarcoma, Squamous Neck Cancer, Stomach Cancer, Supratentorial Primitive Neuroectodermal and Pineal Tumors, T-Cell Lymphoma, Testicular Cancer, Thymoma, Thyroid Cancer, Transitional Cell Cancer of the Renal Pelvis and Ureter, Transitional Renal Pelvis and Ureter Cancer, Trophoblastic Tumors, Ureter and Renal Pelvis Cell Cancer, Urethral Cancer, Uterine Cancer, Uterine Sarcoma, Vaginal Cancer, Visual Pathway and Hypothalamic Glioma, Vulvar Cancer, Waldenstrom's Macroglobulinemia, Wilms' Tumor, and any other hyperproliferative disease, besides neoplasia, located in an organ system listed above.

[0552] In another preferred embodiment, polynucleotides or polypeptides, or agonists or antagonists of the present invention are used to diagnose, prognose, prevent, and/or treat premalignant conditions and to prevent progression to a neoplastic or malignant state, including but not limited to those disorders described above. Such uses are indicated in conditions known or suspected of preceding progression to neoplasia or cancer, in particular, where non-neoplastic cell growth consisting of hyperplasia, metaplasia, or most particularly, dysplasia has occurred (for review of such abnormal growth conditions, see Robbins and Angell, 1976, Basic Pathology, 2d Ed., W. B. Saunders Co., Philadelphia, pp. 68-79.)

[0553] Hyperplasia is a form of controlled cell proliferation, involving an increase in cell number in a tissue or organ, without significant alteration in structure or function. Hyperplastic disorders which can be diagnosed, prognosed, prevented, and/or treated with compositions of the invention (including polynucleotides, polypeptides, agonists or antagonists) include, but are not limited to, angiofollicular mediastinal lymph node hyperplasia, angiolymphoid hyperplasia with eosinophilia, atypical melanocytic hyperplasia, basal cell hyperplasia, benign giant lymph node hyperplasia, cementum hyperplasia, congenital adrenal hyperplasia, congenital sebaceous hyperplasia, cystic hyperplasia, cystic hyperplasia of the breast, denture hyperplasia, ductal hyperplasia, endometrial hyperplasia, fibromuscular hyperplasia, focal epithelial hyperplasia, gingival hyperplasia, inflammatory fibrous hyperplasia, inflammatory papillary hyperplasia, intravascular papillary endothelial hyperplasia, nodular hyperplasia of prostate, nodular regenerative hyperplasia, pseudoepitheliomatous hyperplasia, senile sebaceous hyperplasia, and verrucous hyperplasia.

[0554] Metaplasia is a form of controlled cell growth in which one type of adult or fully differentiated cell substitutes for another type of adult cell. Metaplastic disorders which can be diagnosed, prognosed, prevented, and/or treated with compositions of the invention (including polynucleotides, polypeptides, agonists or antagonists) include, but are not limited to, agnogenic myeloid metaplasia, apocrine metaplasia, atypical metaplasia, autoparenchymatous metaplasia, connective tissue metaplasia, epithelial metaplasia, intestinal metaplasia, metaplastic anemia, metaplastic ossification, metaplastic polyps, myeloid metaplasia, primary myeloid metaplasia, secondary myeloid metaplasia, squamous metaplasia, squamous metaplasia of amnion, and symptomatic myeloid metaplasia.

[0555] Dysplasia is frequently a forerunner of cancer, and is found mainly in the epithelia; it is the most disorderly form of non-neoplastic cell growth, involving a loss in individual cell uniformity and in the architectural orientation of cells. Dysplastic cells often have abnormally large, deeply stained nuclei, and exhibit pleomorphism. Dysplasia characteristically occurs where there exists chronic irritation or inflammation. Dysplastic disorders which can be diagnosed, prognosed, prevented, and/or treated with compositions of the invention (including polynucleotides, polypeptides, agonists or antagonists) include, but are not limited to, anhidrotic ectodermal dysplasia, anterofacial dysplasia, asphyxiating thoracic dysplasia, atriodigital dysplasia, bronchopulmonary dysplasia, cerebral dysplasia, cervical dysplasia, chondroectodermal dysplasia, cleidocranial dysplasia, congenital ectodermal dysplasia, craniodiaphysial dysplasia, craniocarpotarsal dysplasia, craniometaphysial dysplasia, dentin dysplasia, diaphysial dysplasia, ectodermal dysplasia, enamel dysplasia, encephalo-ophthalmic dysplasia, dysplasia epiphysialis hemimelia, dysplasia epiphysialis multiplex, dysplasia epiphysialis punctata, epithelial dysplasia, faciodigitogenital dysplasia, familial fibrous dysplasia of jaws, familial white folded dysplasia, fibromuscular dysplasia, fibrous dysplasia of bone, florid osseous dysplasia, hereditary renal-retinal dysplasia, hidrotic ectodermal dysplasia, hypohidrotic ectodermal dysplasia, lymphopenic thymic dysplasia, mammary dysplasia, mandibulofacial dysplasia, metaphysial dysplasia, Mondini dysplasia, monostotic fibrous dysplasia, mucoepithelial dysplasia, multiple epiphysial dysplasia, oculoauriculovertebral dysplasia, oculodentodigital dysplasia, oculovertebral dysplasia, odontogenic dysplasia, ophthalmomandibulomelic dysplasia, periapical cemental dysplasia, polyostotic fibrous dysplasia, pseudoachondroplastic spondyloepiphysial dysplasia, retinal dysplasia, septooptic dysplasia, spondyloepiphysial dysplasia, and ventriculoradial dysplasia.

[0556] Additional pre-neoplastic disorders which can be diagnosed, prognosed, prevented, and/or treated with compositions of the invention (including polynucleotides, polypeptides, agonists or antagonists) include, but are not limited to, benign dysproliferative disorders (e.g., benign tumors, fibrocystic conditions, tissue hypertrophy, intestinal polyps, colon polyps, and esophageal dysplasia), leukoplakia, keratoses, Bowen's disease, Farmer's Skin, solar cheilitis, and solar keratosis.

[0557] In another embodiment, polynucleotides, polypeptides, antibodies, and/or agonists or antagonists of the present invention conjugated to a toxin or a radioactive isotope, as described herein, may be used to treat cancers and neoplasms, including, but not limited to those described herein. In a further preferred embodiment, polynucleotides, polypeptides, antibodies, and/or agonists or antagonists of the present invention conjugated to a toxin or a radioactive isotope, as described herein, may be used to treat acute myelogenous leukemia.

[0558] Additionally, polynucleotides, polypeptides, and/or agonists or antagonists of the invention may affect apoptosis, and therefore, would be useful in treating a number of diseases associated with increased cell survival or the inhibition of apoptosis. For example, diseases associated with increased cell survival or the inhibition of apoptosis that could be diagnosed, prognosed, prevented, and/or treated by polynucleotides, polypeptides, and/or agonists or antagonists of the invention, include cancers (such as follicular lymphomas, carcinomas with p53 mutations, and hormone-dependent tumors, including, but not limited to colon cancer, cardiac tumors, pancreatic cancer, melanoma, retinoblastoma, glioblastoma, lung cancer, intestinal cancer, testicular cancer, stomach cancer, neuroblastoma, myxoma, myoma, lymphoma, endothelioma, osteoblastoma, osteoclastoma, osteosarcoma, chondrosarcoma, adenoma, breast cancer, prostate cancer, Kaposi's sarcoma and ovarian cancer); autoimmune disorders such as, multiple sclerosis, Sjogren's syndrome, Hashimoto's thyroiditis, biliary cirrhosis, Behcet's disease, Crohn's disease, polymyositis, systemic lupus erythematosus and immune-related glomerulonephritis and rheumatoid arthritis) and viral infections (such as herpes viruses, pox viruses and adenoviruses), inflammation, graft v. host disease, acute graft rejection, and chronic graft rejection.

[0559] In preferred embodiments, polynucleotides, polypeptides, and/or agonists or antagonists of the invention are used to inhibit growth, progression, and/or metastasis of cancers, in particular those listed above.

[0560] Additional diseases or conditions associated with increased cell survival that could be diagnosed, prognosed, prevented, and/or treated by polynucleotides, polypeptides, and/or agonists or antagonists of the invention, include, but are not limited to, progression, and/or metastases of malignancies and related disorders such as leukemia (including acute leukemias (e.g., acute lymphocytic leukemia, acute myelocytic leukemia (including myeloblastic, promyelocytic, myelomonocytic, monocytic, and erythroleukemia)) and chronic leukemias (e.g., chronic myelocytic (granulocytic) leukemia and chronic lymphocytic leukemia)), polycythemia vera, lymphomas (e.g., Hodgkin's disease and non-Hodgkin's disease), multiple myeloma, Waldenstrom's macroglobulinemia, heavy chain disease, and solid tumors including, but not limited to, sarcomas and carcinomas such as fibrosarcoma, myxosarcoma, liposarcoma, chondrosarcoma, osteogenic sarcoma, chordoma, angiosarcoma, endotheliosarcoma, lymphangiosarcoma, lymphangioendotheliosarcoma, synovioma, mesothelioma, Ewing's tumor, leiomyosarcoma, rhabdomyosarcoma, colon carcinoma, pancreatic cancer, breast cancer, ovarian cancer, prostate cancer, squamous cell carcinoma, basal cell carcinoma, adenocarcinoma, sweat gland carcinoma, sebaceous gland carcinoma, papillary carcinoma, papillary adenocarcinomas, cystadenocarcinoma, medullary carcinoma, bronchogenic carcinoma, renal cell carcinoma, hepatoma, bile duct carcinoma, choriocarcinoma, seminoma, embryonal carcinoma, Wilm's tumor, cervical cancer, testicular tumor, lung carcinoma, small cell lung carcinoma, bladder carcinoma, epithelial carcinoma, glioma, astrocytoma, medulloblastoma, craniopharyngioma, ependymoma, pinealoma, emangioblastoma, acoustic neuroma, oligodendroglioma, menangioma, melanoma, neuroblastoma, and retinoblastoma.

[0561] Diseases associated with increased apoptosis that could be diagnosed, prognosed, prevented, and/or treated by polynucleotides, polypeptides, and/or agonists or antagonists of the invention, include AIDS; neurodegenerative disorders (such as Alzheimer's disease, Parkinson's disease, amyotrophic lateral sclerosis, retinitis pigmentosa, cerebellar degeneration and brain tumor or prior associated disease); autoimmune disorders (such as, multiple sclerosis, Sjogren's syndrome, Hashimoto's thyroiditis, biliary cirrhosis, Behcet's disease, Crohn's disease, polymyositis, systemic lupus erythematosus and immune-related glomerulonephritis and rheumatoid arthritis) myelodysplastic syndromes (such as aplastic anemia), graft v. host disease, ischemic injury (such as that caused by myocardial infarction, stroke and reperfusion injury), liver injury (e.g., hepatitis related liver injury, ischemia/reperfusion injury, cholestosis (bile duct injury) and liver cancer); toxin-induced liver disease (such as that caused by alcohol), septic shock, cachexia and anorexia.

[0562] Hyperproliferative diseases and/or disorders that could be diagnosed, prognosed, prevented, and/or treated by polynucleotides, polypeptides, and/or agonists or antagonists of the invention, include, but are not limited to, neoplasms located in the liver, abdomen, bone, breast, digestive system, pancreas, peritoneum, endocrine glands (adrenal, parathyroid, pituitary, testicles, ovary, thymus, thyroid), eye, head and neck, nervous system (central and peripheral), lymphatic system, pelvis, skin, soft tissue, spleen, thorax, and urogenital tract.

[0563] Similarly, other hyperproliferative disorders can also be diagnosed, prognosed, prevented, and/or treated by polynucleotides, polypeptides, and/or agonists or antagonists of the invention. Examples of such hyperproliferative disorders include, but are not limited to: hypergammaglobulinemia, lymphoproliferative disorders, paraproteinemias, purpura, sarcoidosis, Sezary Syndrome, Waldenstron's macroglobulinemia, Gaucher's Disease, histiocytosis, and any other hyperproliferative disease, besides neoplasia, located in an organ system listed above.

[0564] One preferred embodiment utilizes polynucleotides of the present invention to inhibit aberrant cellular division, by gene therapy using the present invention, and/or protein fusions or fragments thereof.

[0565] Thus, the present invention provides a method for treating cell proliferative diseases, disorders, and/or conditions by inserting into an abnormally proliferating cell a polynucleotide of the present invention, wherein said polynucleotide represses said cell proliferation, disease, disorder, and/or condition.

[0566] In a preferred embodiment, the present invention provides a method for treating cell proliferative diseases, disorders and/or conditions of the breast and ovaries by inserting into a cell, a polynucleotide of the present invention, wherein said polynucleotide represses said cell proliferation, disease and/or disorder.

[0567] Another embodiment of the present invention provides a method of treating cell-proliferative diseases, disorders, and/or conditions in individuals comprising administration of one or more active gene copies of the present invention to an abnormally proliferating cell or cells. In a preferred embodiment, polynucleotides of the present invention is a DNA construct comprising a recombinant expression vector effective in expressing a DNA sequence encoding said polynucleotides. In another preferred embodiment of the present invention, the DNA construct encoding the polynucleotides of the present invention is inserted into cells to be treated utilizing a retrovirus, or more preferably an adenoviral vector (see, e.g., G J. Nabel, et. al., PNAS 96: 324-326 (1999), which is hereby incorporated by reference). In a most preferred embodiment, the viral vector is defective and will not transform non-proliferating cells, only proliferating cells. Moreover, in a preferred embodiment, the polynucleotides of the present invention inserted into proliferating cells either alone, or in combination with or fused to other polynucleotides, can then be modulated via an external stimulus (i.e., magnetic, specific small molecule, chemical, or drug administration, etc.), which acts upon the promoter upstream of said polynucleotides to induce expression of the encoded protein product. As such the beneficial therapeutic affect of the present invention may be expressly modulated (i.e., to increase, decrease, or inhibit expression of the present invention) based upon said external stimulus.

[0568] Polynucleotides of the present invention may be useful in repressing expression of oncogenic genes or antigens. By “repressing expression of the oncogenic genes” is intended the suppression of the transcription of the gene, the degradation of the gene transcript (pre-message RNA), the inhibition of splicing, the destruction of the messenger RNA, the prevention of the post-translational modifications of the protein, the destruction of the protein, or the inhibition of the normal function of the protein.

[0569] For local administration to abnormally proliferating cells, polynucleotides of the present invention may be administered by any method known to those of skill in the art including, but not limited to transfection, electroporation, microinjection of cells, or in vehicles such as liposomes, lipofectin, or as naked polynucleotides, or any other method described throughout the specification. The polynucleotide of the present invention may be delivered by known gene delivery systems such as, but not limited to, retroviral vectors (Gilboa, J. Virology 44:845 (1982); Hocke, Nature 320:275 (1986); Wilson, et al., Proc. Natl. Acad. Sci. U.S.A. 85:3014), vaccinia virus system (Chakrabarty et al., Mol. Cell Biol. 5:3403 (1985) or other efficient DNA delivery systems (Yates et al., Nature 313:812 (1985)) known to those skilled in the art. These references are exemplary only and are hereby incorporated by reference. In order to specifically deliver or transfect cells which are abnormally proliferating and spare non-dividing cells, it is preferable to utilize a retrovirus, or adenoviral (as described in the art and elsewhere herein) delivery system known to those of skill in the art. Since host DNA replication is required for retroviral DNA to integrate and the retrovirus will be unable to self replicate due to the lack of the retrovirus genes needed for its life cycle. Utilizing such a retroviral delivery system for polynucleotides of the present invention will target said gene and constructs to abnormally proliferating cells and will spare the non-dividing normal cells.

[0570] The polynucleotides of the present invention may be delivered directly to cell proliferative disorder/disease sites in internal organs, body cavities and the like by use of imaging devices used to guide an injecting needle directly to the disease site. The polynucleotides of the present invention may also be administered to disease sites at the time of surgical intervention.

[0571] By “cell proliferative disease” is meant any human or animal disease or disorder, affecting any one or any combination of organs, cavities, or body parts, which is characterized by single or multiple local abnormal proliferations of cells, groups of cells, or tissues, whether benign or malignant.

[0572] Any amount of the polynucleotides of the present invention may be administered as long as it has a biologically inhibiting effect on the proliferation of the treated cells. Moreover, it is possible to administer more than one of the polynucleotide of the present invention simultaneously to the same site. By “biologically inhibiting” is meant partial or total growth inhibition as well as decreases in the rate of proliferation or growth of the cells. The biologically inhibitory dose may be determined by assessing the effects of the polynucleotides of the present invention on target malignant or abnormally proliferating cell growth in tissue culture, tumor growth in animals and cell cultures, or any other method known to one of ordinary skill in the art.

[0573] The present invention is further directed to antibody-based therapies which involve administering of anti-polypeptides and anti-polynucleotide antibodies to a mammalian, preferably human, patient for treating one or more of the described diseases, disorders, and/or conditions. Methods for producing anti-polypeptides and anti-polynucleotide antibodies polyclonal and monoclonal antibodies are described in detail elsewhere herein. Such antibodies may be provided in pharmaceutically acceptable compositions as known in the art or as described herein.

[0574] A summary of the ways in which the antibodies of the present invention may be used therapeutically includes binding polynucleotides or polypeptides of the present invention locally or systemically in the body or by direct cytotoxicity of the antibody, e.g., as mediated by complement (CDC) or by effector cells (ADCC). Some of these approaches are described in more detail below. Armed with the teachings provided herein, one of ordinary skill in the art will know how to use the antibodies of the present invention for diagnostic, monitoring or therapeutic purposes without undue experimentation.

[0575] In particular, the antibodies, fragments and derivatives of the present invention are useful for treating a subject having or developing cell proliferative and/or differentiation diseases, disorders, and/or conditions as described herein. Such treatment comprises administering a single or multiple doses of the antibody, or a fragment, derivative, or a conjugate thereof.

[0576] The antibodies of this invention may be advantageously utilized in combination with other monoclonal or chimeric antibodies, or with lymphokines or hematopoietic growth factors, for example, which serve to increase the number or activity of effector cells which interact with the antibodies.

[0577] It is preferred to use high affinity and/or potent in vivo inhibiting and/or neutralizing antibodies against polypeptides or polynucleotides of the present invention, fragments or regions thereof, for both immunoassays directed to and therapy of diseases, disorders, and/or conditions related to polynucleotides or polypeptides, including fragments thereof, of the present invention. Such antibodies, fragments, or regions, will preferably have an affinity for polynucleotides or polypeptides, including fragments thereof. Preferred binding affinities include those with a dissociation constant or Kd less than 5×10⁻⁶ M, 10⁻⁶ M, 5×10⁻⁷ M, 10⁻⁷ M, 5×10⁻⁸ M, 10⁻⁸ M, 5×10⁻⁹M, 10⁻⁹ M, 5×10⁻¹⁰ M, 10⁻¹⁰ M, 5×10⁻¹¹ M, 10⁻¹¹ M, 5×10⁻¹² M, 10⁻¹² M, 5×10^{—}M, 10⁻¹³ M, 5×10⁻¹⁴ M, 10⁻¹⁴ M, 5×10⁻¹⁵ M, and 10⁻¹⁵ M.

[0578] Moreover, breast and ovarian antigen polypeptides of the present invention or fragments thereof, are useful in inhibiting the angiogenesis of proliferative cells or tissues, either alone, as a protein fusion, or in combination with other polypeptides directly or indirectly, as described elsewhere herein. In a most preferred embodiment, said anti-angiogenesis effect may be achieved indirectly, for example, through the inhibition of hematopoietic, tumor-specific cells, such as tumor-associated macrophages (see, e.g., Joseph I B, et al. J Natl Cancer Inst, 90(21):1648-53 (1998), which is hereby incorporated by reference). Antibodies directed to polypeptides or polynucleotides of the present invention may also result in inhibition of angiogenesis directly, or indirectly (see, e.g., Witte L, et al., Cancer Metastasis Rev. 17(2):155-61 (1998), which is hereby incorporated by reference)).

[0579] Polypeptides, including protein fusions, of the present invention, or fragments thereof may be useful in inhibiting proliferative cells or tissues through the induction of apoptosis. Said polypeptides may act either directly, or indirectly to induce apoptosis of proliferative cells and tissues, for example in the activation of a death-domain receptor, such as tumor necrosis factor (TNF) receptor-1, CD95 (Fas/APO-1), TNF-receptor-related apoptosis-mediated protein (TRAMP) and TNF-related apoptosis-inducing ligand (TRAIL) receptor-1 and -2 (see, e.g., Schulze-Osthoff K, et.al., Eur J Biochem 254(3):439-59 (1998), which is hereby incorporated by reference). Moreover, in another preferred embodiment of the present invention, said polypeptides may induce apoptosis through other mechanisms, such as in the activation of other proteins which will activate apoptosis, or through stimulating the expression of said proteins, either alone or in combination with small molecule drugs or adjuvants, such as apoptonin, galectins, thioredoxins, antiinflammatory proteins (See for example, Mutat. Res. 400(1-2):447-55 (1998), Med Hypotheses.50(5):423-33 (1998), Chem. Biol. Interact. Apr 24;111-112:23-34 (1998), J. Mo. Med. 76(6):402-12 (1998), Int. J. Tissue React. 20(1):3-15 (1998), which are all hereby incorporated by reference).

[0580] Polypeptides, including protein fusions to, or fragments thereof, of the present invention are useful in inhibiting the metastasis of proliferative cells or tissues. Inhibition may occur as a direct result of administering polypeptides, or antibodies directed to said polypeptides as described elsewhere herein, or indirectly, such as activating the expression of proteins known to inhibit metastasis, for example alpha 4 integrins, (See, e.g., Curr Top Microbiol Immunol 1998;231:125-41, which is hereby incorporated by reference). Such therapeutic affects of the present invention may be achieved either alone, or in combination with small molecule drugs or adjuvants.

[0581] In another embodiment, the invention provides a method of delivering compositions containing the polypeptides of the invention (e.g., compositions containing polypeptides or anti-breast and ovarian antigen polypeptide antibodies associated with heterologous polypeptides, heterologous nucleic acids, toxins, or prodrugs) to targeted cells expressing the polypeptide of the present invention. Breast and ovarian antigen polypeptides or anti-breast and ovarian antigen polypeptide antibodies of the invention may be associated with heterologous polypeptides, heterologous nucleic acids, toxins, or prodrugs via hydrophobic, hydrophilic, ionic and/or covalent interactions.

[0582] Polypeptides, protein fusions to, or fragments thereof, of the present invention are useful in enhancing the immunogenicity and/or antigenicity of proliferating cells or tissues, either directly, such as would occur if the polypeptides of the present invention ‘vaccinated’ the immune response to respond to proliferative antigens and immunogens, or indirectly, such as in activating the expression of proteins known to enhance the immune response (e.g. chemokines), to said antigens and immunogens.

[0583] Urinary System Disorders

[0584] Polynucleotides, polypeptides, antibodies, and/or agonists or antagonists of the present invention, may be used to treat, prevent, diagnose, and/or prognose disorders of the urinary system, including but not limited to disorders of the renal system, bladder, ureters, and urethra. Renal disorders include, but are not limited to, kidney failure, nephritis, blood vessel disorders of kidney, metabolic and congenital kidney disorders, urinary disorders of the kidney, autoimmune disorders, sclerosis and necrosis, electrolyte imbalance, and kidney cancers.

[0585] Kidney failure diseases include, but are not limited to, acute kidney failure, chronic kidney failure, atheroembolic renal failure, and end-stage renal disease. Inflammatory diseases of the kidney include acute glomerulonephritis, postinfectious glomerulonephritis, rapidly progressive glomerulonephritis, nephrotic syndrome, membranous glomerulonephritis, familial nephrotic syndrome, membranoproliferative glomerulonephritis I and II, mesangial proliferative glomerulonephritis, chronic glomerulonephritis, acute tubulointerstitial nephritis, chronic tubulointerstitial nephritis, acute post-streptococcal glomerulonephritis (PSGN), pyelonephritis, lupus nephritis, chronic nephritis, interstitial nephritis, and post-streptococcal glomerulonephritis.

[0586] Blood vessel disorders of the kidneys include, but are not limited to, kidney infarction, atheroembolic kidney disease, cortical necrosis, malignant nephrosclerosis, renal vein thrombosis, renal underperfusion, renal ischemia-reperfusion, renal artery embolism, and renal artery stenosis. Kidney disorders resulting form urinary tract problems include, but are not limited to, pyelonephritis, hydronephrosis, urolithiasis (renal lithiasis, nephrolithiasis), reflux nephropathy, urinary tract infections, urinary retention, and acute or chronic unilateral obstructive uropathy.

[0587] Metabolic and congenital disorders of the kidneys include, but are not limited to, renal tubular acidosis, renal glycosuria, nephrogenic diabetes insipidus, cystinuria, Fanconi's syndrome, vitamin D-resistant rickets, Hartnup disease, Bartter's syndrome, Liddle's syndrome, polycystic kidney disease, medullary cystic disease, medullary sponge kidney, Alport's syndrome, nail-patella syndrome, congenital nephrotic syndrome, CRUSH syndrome, horseshoe kidney, diabetic nephropathy, nephrogenic diabetes insipidus, analgesic nephropathy, kidney stones, and membranous nephropathy, Kidney disorders resulting from an autoimmune response include, but are not limited to, systemic lupus erythematosus (SLE), Goodpasture syndrome, IgA nephropathy, and IgM mesangial proliferative glomerulonephritis.

[0588] Sclerotic or necrotic disorders of the kidney include, but are not limited to, glomerulosclerosis, diabetic nephropathy, focal segmental glomerulosclerosis (FSGS), necrotizing glomerulonephritis, and renal papillary necrosis. Kidneys may also develop carcinomas, including, but not limited to, hypernephroma, nephroblastoma, renal cell cancer, transitional cell cancer, squamous cell cancer, and Wilm's tumor.

[0589] Kidney disorders may also result in electrolyte imbalances, including, but not limited to, nephrocalcinosis, pyuria, edema, hydronephritis, proteinuria, hyponatremia, hypernatremia, hypokalemia, hyperkalemia, hypocalcemia, hypercalcemia, hypophosphatemia, and hyperphosphatemia.

[0590] Bladder disorders include, but are not limited to, benign prostatic hyperplasia (BPH), interstitial cystitis (IC), prostatitis, proteinuria, urinary tract infections, urinary incontinence, urinary retention. Disorders of the ureters and urethra include, but are not limited to, acute or chronic unilateral obstructive uropathy. The bladder, ureters, and urethra may also develop carcinomas, including, but not limited to, superficial bladder canccer, invasive bladder cancer, carcinoma of the ureter, and urethra cancers.

[0591] Polypeptides may be administered using any method known in the art, including, but not limited to, direct needle injection at the delivery site, intravenous injection, topical administration, catheter infusion, biolistic injectors, particle accelerators, gelfoam sponge depots, other commercially available depot materials, osmotic pumps, oral or suppositorial solid pharmaceutical formulations, decanting or topical applications during surgery, aerosol delivery. Such methods are known in the art. Polypeptides may be administered as part of a Therapeutic, described in more detail below. Methods of delivering polynucleotides are described in more detail herein.

[0592] Cardiovascular Disorders

[0593] Polynucleotides or polypeptides, or agonists or antagonists of the present invention, may be used to treat, prevent, diagnose, and/or prognose cardiovascular disorders, including, but not limited to, peripheral artery disease, such as limb ischemia.

[0594] Cardiovascular disorders include cardiovascular abnormalities, such as arterio-arterial fistula, arteriovenous fistula, cerebral arteriovenous malformations, congenital heart defects, pulmonary atresia, and Scimitar Syndrome. Congenital heart defects include aortic coarctation, cor triatriatum, coronary vessel anomalies, crisscross heart, dextrocardia, patent ductus arteriosus, Ebstein's anomaly, Eisenmenger complex, hypoplastic left heart syndrome, levocardia, tetralogy of fallot, transposition of great vessels, double outlet right ventricle, tricuspid atresia, persistent truncus arteriosus, total anomalous pulmonary venous connection, hypoplastic left heart syndrome, and heart septal defects, such as aortopulmonary septal defect, endocardial cushion defects, Lutembacher's Syndrome, atrioventricular canal defect, trilogy of Fallot, ventricular heart septal defects.

[0595] Cardiovascular disorders also include heart disease, such as arrhythmias, carcinoid heart disease, high cardiac output, low cardiac output, cardiac tamponade, endocarditis (including bacterial), heart aneurysm, cardiac arrest, sudden cardiac death, congestive heart failure, congestive cardiomyopathy, paroxysmal dyspnea, cardiac edema, heart hypertrophy, congestive cardiomyopathy, left ventricular hypertrophy, right ventricular hypertrophy, post-infarction heart rupture, ventricular septal rupture, heart valve diseases, myocardial diseases, myocardial ischemia, pericardial effusion, pericarditis (including constrictive and tuberculous), pneumopericardium, postpericardiotomy syndrome, pulmonary heart disease, rheumatic heart disease, ventricular dysfunction, hyperemia, cardiovascular pregnancy complications, Scimitar Syndrome, diastolic dysfunction, enlarged heart, heart block, J-curve phenomenon, rheumatic heart disease, Marfan syndrome, cardiovascular syphilis, and cardiovascular tuberculosis.

[0596] Arrhythmias include sinus arrhythmia, atrial fibrillation, atrial flutter, bradycardia, extrasystole, Adams-Stokes Syndrome, bundle-branch block, sinoatrial block, long QT syndrome, parasystole, Lown-Ganong-Levine Syndrome, Mahaim-type pre-excitation syndrome, Wolff-Parkinson-White syndrome, sick sinus syndrome, tachycardias, and ventricular fibrillation. Tachycardias include paroxysmal tachycardia, supraventricular tachycardia, accelerated idioventricular rhythm, atrioventricular nodal reentry tachycardia, ectopic atrial tachycardia, ectopic junctional tachycardia, sinoatrial nodal reentry tachycardia, sinus tachycardia, Torsades de Pointes, and ventricular tachycardia.

[0597] Heart valve disease include aortic valve insufficiency, aortic valve stenosis, heart murmurs, aortic valve prolapse, mitral valve prolapse, tricuspid valve prolapse, mitral valve insufficiency, mitral valve stenosis, pulmonary atresia, pulmonary valve insufficiency, pulmonary valve stenosis, tricuspid atresia, tricuspid valve insufficiency, tricuspid valve stenosis, and bicuspid aortic valve.

[0598] Myocardial diseases include alcoholic cardiomyopathy, congestive cardiomyopathy, hypertrophic cardiomyopathy, aortic subvalvular stenosis, pulmonary subvalvular stenosis, restrictive cardiomyopathy, Chagas cardiomyopathy, endocardial fibroelastosis, endomyocardial fibrosis, Kearns Syndrome, Barth syndrome, myocardial reperfusion injury, and myocarditis.

[0599] Myocardial ischemias include coronary disease, such as angina pectoris, Prinzmetal's angina, unstable angina, coronary aneurysm, coronary arteriosclerosis, coronary thrombosis, coronary vasospasm, myocardial infarction and myocardial stunning.

[0600] Cardiovascular diseases also include vascular diseases such as aneurysms, angiodysplasia, angiomatosis, bacillary angiomatosis, Hippel-Lindau Disease, Klippel-Trenaunay-Weber Syndrome, Sturge-Weber Syndrome, angioneurotic edema, aortic diseases, Takayasu's Arteritis, aortitis, Leriche's Syndrome, arterial occlusive diseases, arteritis, enarteritis, polyarteritis nodosa, cerebrovascular disorders, diabetic angiopathies, diabetic retinopathy, embolisms, thrombosis, erythromelalgia, hemorrhoids, hepatic veno-occlusive disease, hypertension, hypotension (shock), ischemia, peripheral vascular diseases, phlebitis, superficial phlebitis, pulmonary veno-occlusive disease, chronic obstructive pulmonary disease, Buerger's disease, Raynaud's disease, CREST syndrome, retinal vein occlusion, Scimitar syndrome, superior vena cava syndrome, telangiectasia, atacia telangiectasia, hereditary hemorrhagic telangiectasia, deep vein thrombosis, varicocele, varicose veins, varicose ulcer, vasculitis, and venous insufficiency.

[0601] Aneurysms include dissecting aneurysms, false aneurysms, infected aneurysms, ruptured aneurysms, aortic aneurysms, cerebral aneurysms, coronary aneurysms, heart aneurysms, and iliac aneurysms.

[0602] Arterial occlusive diseases include arteriosclerosis, arteriolosclerosis, atherosclerosis, intermittent claudication, carotid stenosis, fibromuscular dysplasias, mesenteric vascular occlusion, Moyamoya disease, renal artery obstruction, retinal artery occlusion, and thromboangiitis obliterans.

[0603] Cerebrovascular disorders include carotid artery diseases, cerebral amyloid angiopathy, cerebral aneurysm, cerebral anoxia, cerebral arteriosclerosis, cerebral arteriovenous malformation, cerebral artery diseases, cerebral embolism and thrombosis, carotid artery thrombosis, sinus thrombosis, Wallenberg's syndrome, cerebral hemorrhage, epidural hematoma, subdural hematoma, subaraxhnoid hemorrhage, cerebral infarction, cerebral ischemia (including transient), subclavian steal syndrome, periventricular leukomalacia, vascular headache, cluster headache, migraine, and vertebrobasilar insufficiency.

[0604] Embolisms include air embolisms, amniotic fluid embolisms, cholesterol embolisms, blue toe syndrome, fat embolisms, pulmonary embolisms, and thromoboembolisms. Thrombosis include coronary thrombosis, hepatic vein thrombosis, deep vein thrombosis, retinal vein occlusion, carotid artery thrombosis, sinus thrombosis, Wallenberg's syndrome, and thrombophlebitis.

[0605] Ischemia includes cerebral ischemia, ischemic colitis, silent ischemia, compartment syndromes, anterior compartment syndrome, myocardial ischemia, reperfusion injuries, and peripheral limb ischemia. Vasculitis includes aortitis, arteritis, Behcet's Syndrome, Churg-Strauss Syndrome, mucocutaneous lymph node syndrome, thromboangiitis obliterans, hypersensitivity vasculitis, Schoenlein-Henoch purpura, allergic cutaneous vasculitis, and Wegener's granulomatosis.

[0606] Cardiovascular diseases can also occur due to electrolyte imbalances that include, but are not limited to hyponatremia, hypematremia, hypokalemia, hyperkalemia, hypocalcemia, hypercalcemia, hypophosphatemia, and hyperphophatemia. Neoplasm and/or cancers of the cardiovascular system include, but are not limited to, myxomas, fibromas, and rhabdomyomas.

[0607] Polypeptides may be administered using any method known in the art, including, but not limited to, direct needle injection at the delivery site, intravenous injection, topical administration, catheter infusion, biolistic injectors, particle accelerators, gelfoam sponge depots, other commercially available depot materials, osmotic pumps, oral or suppositorial solid pharmaceutical formulations, decanting or topical applications during surgery, aerosol delivery. Such methods are known in the art. Polypeptides may be administered as part of a Therapeutic, described in more detail below. Methods of delivering polynucleotides are described in more detail herein.

[0608] Respiratory Disorders

[0609] Polynucleotides or polypeptides, or agonists or antagonists of the present invention may be used to treat, prevent, diagnose, and/or prognose diseases and/or disorders of the respiratory system.

[0610] Diseases and disorders of the respiratory system include, but are not limited to, nasal vestibulitis, nonallergic rhinitis (e.g., acute rhinitis, chronic rhinitis, atrophic rhinitis, vasomotor rhinitis), nasal polyps, and sinusitis, juvenile angiofibromas, cancer of the nose and juvenile papillomas, vocal cord polyps, nodules (singer's nodules), contact ulcers, vocal cord paralysis, laryngoceles, pharyngitis (e.g., viral and bacterial), tonsillitis, tonsillar cellulitis, parapharyngeal abscess, laryngitis, laryngoceles, and throat cancers (e.g., cancer of the nasopharynx, tonsil cancer, larynx cancer), lung cancer (e.g., squamous cell carcinoma, small cell (oat cell) carcinoma, large cell carcinoma, and adenocarcinoma), allergic disorders (eosinophilic pneumonia, hypersensitivity pneumonitis (e.g., extrinsic allergic alveolitis, allergic interstitial pneumonitis, organic dust pneumoconiosis, allergic bronchopulmonary aspergillosis, asthma, Wegener's granulomatosis (granulomatous vasculitis), Goodpasture's syndrome)), pneumonia (e.g., bacterial pneumonia (e.g., Streptococcus pneumoniae (pneumoncoccal pneumonia), Staphylococcus aureus (staphylococcal pneumonia), Gram-negative bacterial pneumonia (caused by, e.g., Klebsiella and Pseudomas spp.), Mycoplasma pneumoniae pneumonia, Hemophilus influenzae pneumonia, Legionella pneumophila (Legionnaires' disease), and Chlamydia psittaci (Psittacosis)), and viral pneumonia (e.g., influenza, chickenpox (varicella).

[0611] Additional diseases and disorders of the respiratory system include, but are not limited to bronchiolitis, polio (poliomyelitis), croup, respiratory syncytial viral infection, mumps, erythema infectiosum (fifth disease), roseola infantum, progressive rubella panencephalitis, german measles, and subacute sclerosing panencephalitis), fungal pneumonia (e.g., Histoplasmosis, Coccidioidomycosis, Blastomycosis, fungal infections in people with severely suppressed immune systems (e.g., cryptococcosis, caused by Cryptococcus neoformans; aspergillosis, caused by Aspergillus spp.; candidiasis, caused by Candida; and mucormycosis)), Pneumocystis carinii (pneumocystis pneumonia), atypical pneumonias (e.g., Mycoplasma and Chlamydia spp.), opportunistic infection pneumonia, nosocomial pneumonia, chemical pneumonitis, and aspiration pneumonia, pleural disorders (e.g., pleurisy, pleural effusion, and pneumothorax (e.g., simple spontaneous pneumothorax, complicated spontaneous pneumothorax, tension pneumothorax)), obstructive airway diseases (e.g., asthma, chronic obstructive pulmonary disease (COPD), emphysema, chronic or acute bronchitis), occupational lung diseases (e.g., silicosis, black lung (coal workers' pneumoconiosis), asbestosis, berylliosis, occupational asthsma, byssinosis, and benign pneumoconioses), Infiltrative Lung Disease (e.g., pulmonary fibrosis (e.g., fibrosing alveolitis, usual interstitial pneumonia), idiopathic pulmonary fibrosis, desquamative interstitial pneumonia, lymphoid interstitial pneumonia, histiocytosis X (e.g., Letterer-Siwe disease, Hand-Schüller-Christian disease, eosinophilic granuloma), idiopathic pulmonary hemosiderosis, sarcoidosis and pulmonary alveolar proteinosis), Acute respiratory distress syndrome (also called, e.g., adult respiratory distress syndrome), edema, pulmonary embolism, bronchitis (e.g., viral, bacterial), bronchiectasis, atelectasis, lung abscess (caused by, e.g., Staphylococcus aureus or Legionella pneumophila), and cystic fibrosis.

[0612] Anti-Angiogenesis Activity

[0613] The naturally occurring balance between endogenous stimulators and inhibitors of angiogenesis is one in which inhibitory influences predominate. Rastinejad et al., Cell 56:345-355 (1989). In those rare instances in which neovascularization occurs under normal physiological conditions, such as wound healing, organ regeneration, embryonic development, and female reproductive processes, angiogenesis is stringently regulated and spatially and temporally delimited. Under conditions of pathological angiogenesis such as that characterizing solid tumor growth, these regulatory controls fail. Unregulated angiogenesis becomes pathologic and sustains progression of many neoplastic and non-neoplastic diseases. A number of serious diseases are dominated by abnormal neovascularization including solid tumor growth and metastases, arthritis, some types of eye disorders, and psoriasis. See, e.g., reviews by Moses et al., Biotech. 9:630-634 (1991); Folkman et al., N. Engl. J. Med., 333:1757-1763 (1995); Auerbach et al., J. Microvasc. Res. 29:401-411 (1985); Folkman, Advances in Cancer Research, eds. Klein and Weinhouse, Academic Press, New York, pp. 175-203 (1985); Patz, Am. J. Opthalmol. 94:715-743 (1982); and Folkman et al., Science 221:719-725 (1983). In a number of pathological conditions, the process of angiogenesis contributes to the disease state. For example, significant data have accumulated which suggest that the growth of solid tumors is dependent on angiogenesis. Folkman and Klagsbrun, Science 235:442-447 (1987).

[0614] The present invention provides for treatment of diseases or disorders associated with neovascularization by administration of the polynucleotides and/or polypeptides of the invention, as well as agonists or antagonists of the present invention. Malignant and metastatic conditions which can be treated with the polynucleotides and polypeptides, or agonists or antagonists of the invention include, but are not limited to, malignancies, solid tumors, and cancers described herein and otherwise known in the art (for a review of such disorders, see Fishman et al., Medicine, 2d Ed., J. B. Lippincott Co., Philadelphia (1985)). Thus, the present invention provides a method of treating an angiogenesis-related disease and/or disorder, comprising administration to an individual in need thereof a therapeutically effective amount of a polynucleotide, polypeptide, antagonist and/or agonist of the invention. For example, polynucleotides, polypeptides, antagonists and/or agonists may be utilized in a variety of additional methods in order to therapeutically treat a cancer or tumor. Cancers which may be treated with polynucleotides, polypeptides, antagonists and/or agonists include, but are not limited to solid tumors, including prostate, lung, breast, ovarian, stomach, pancreas, larynx, esophagus, testes, liver, parotid, biliary tract, colon, rectum, cervix, uterus, endometrium, kidney, bladder, thyroid cancer; primary tumors and metastases; melanomas; glioblastoma; Kaposi's sarcoma; leiomyosarcoma; non-small cell lung cancer; colorectal cancer; advanced malignancies; and blood born tumors such as leukemias. For example, polynucleotides, polypeptides, antagonists and/or agonists may be delivered topically, in order to treat cancers such as skin cancer, head and neck tumors, breast tumors, and Kaposi's sarcoma.

[0615] Within yet other aspects, polynucleotides, polypeptides, antagonists and/or agonists may be utilized to treat superficial forms of bladder cancer by, for example, intravesical administration. Polynucleotides, polypeptides, antagonists and/or agonists may be delivered directly into the tumor, or near the tumor site, via injection or a catheter. Of course, as the artisan of ordinary skill will appreciate, the appropriate mode of administration will vary according to the cancer to be treated. Other modes of delivery are discussed herein.

[0616] Polynucleotides, polypeptides, antagonists and/or agonists may be useful in treating other disorders, besides cancers, which involve angiogenesis. These disorders include, but are not limited to: benign tumors, for example hemangiomas, acoustic neuromas, neurofibromas, trachomas, and pyogenic granulomas; artheroscleric plaques; ocular angiogenic diseases, for example, diabetic retinopathy, retinopathy of prematurity, macular degeneration, corneal graft rejection, neovascular glaucoma, retrolental fibroplasia, rubeosis, retinoblastoma, uvietis and Pterygia (abnormal blood vessel growth) of the eye; rheumatoid arthritis; psoriasis; delayed wound healing; endometriosis; vasculogenesis; granulations; hypertrophic scars (keloids); nonunion fractures; scieroderma; trachoma; vascular adhesions; myocardial angiogenesis; coronary collaterals; cerebral collaterals; arteriovenous malformations; ischemic limb angiogenesis; Osler-Webber Syndrome; plaque neovascularization; telangiectasia; hemophiliac joints; angiofibroma; fibromuscular dysplasia; wound granulation; Crohn's disease; and atherosclerosis.

[0617] For example, within one aspect of the present invention methods are provided for treating hypertrophic scars and keloids, comprising the step of administering a polynucleotide, polypeptide, antagonist and/or agonist of the invention to a hypertrophic scar or keloid.

[0618] Within one embodiment of the present invention polynucleotides, polypeptides, antagonists and/or agonists of the invention are directly injected into a hypertrophic scar or keloid, in order to prevent the progression of these lesions. This therapy is of particular value in the prophylactic treatment of conditions which are known to result in the development of hypertrophic scars and keloids (e.g., burns), and is preferably initiated after the proliferative phase has had time to progress (approximately 14 days after the initial injury), but before hypertrophic scar or keloid development. As noted above, the present invention also provides methods for treating neovascular diseases of the eye, including for example, corneal neovascularization, neovascular glaucoma, proliferative diabetic retinopathy, retrolental fibroplasia and macular degeneration.

[0619] Moreover, ocular disorders associated with neovascularization which can be treated with the polynucleotides and polypeptides of the present invention (including agonists and/or antagonists) include, but are not limited to: neovascular glaucoma, diabetic retinopathy, retinoblastoma, retrolental fibroplasia, uveitis, retinopathy of prematurity macular degeneration, corneal graft neovascularization, as well as other eye inflammatory diseases, ocular tumors and diseases associated with choroidal or iris neovascularization. See, e.g., reviews by Waltman et al., Am. J. Ophthal. 85:704-710 (1978) and Gartner et al., Surv. Ophthal. 22:291-312 (1978).

[0620] Thus, within one aspect of the present invention methods are provided for treating neovascular diseases of the eye such as corneal neovascularization (including corneal graft neovascularization), comprising the step of administering to a patient a therapeutically effective amount of a compound (as described above) to the cornea, such that the formation of blood vessels is inhibited. Briefly, the cornea is a tissue, which normally lacks blood vessels. In certain pathological conditions however, capillaries may extend into the cornea from the pericorneal vascular plexus of the limbus. When the cornea becomes vascularized, it also becomes clouded, resulting in a decline in the patient's visual acuity. Visual loss may become complete if the cornea completely opacitates. A wide variety of disorders can result in corneal neovascularization, including for example, corneal infections (e.g., trachoma, herpes simplex keratitis, leishmaniasis and onchocerciasis), immunological processes (e.g., graft rejection and Stevens-Johnson's syndrome), alkali bums, trauma, inflammation (of any cause), toxic and nutritional deficiency states, and as a complication of wearing contact lenses.

[0621] Within particularly preferred embodiments of the invention, may be prepared for topical administration in saline (combined with any of the preservatives and antimicrobial agents commonly used in ocular preparations), and administered in eyedrop form. The solution or suspension may be prepared in its pure form and administered several times daily. Alternatively, anti-angiogenic compositions, prepared as described above, may also be administered directly to the cornea. Within preferred embodiments, the anti-angiogenic composition is prepared with a muco-adhesive polymer, which binds to cornea. Within further embodiments, the anti-angiogenic factors or anti-angiogenic compositions may be utilized as an adjunct to conventional steroid therapy. Topical therapy may also be useful prophylactically in corneal lesions which are known to have a high probability of inducing an angiogenic response (such as chemical burns). In these instances the treatment, likely in combination with steroids, may be instituted immediately to help prevent subsequent complications.

[0622] Within other embodiments, the compounds described above may be injected directly into the corneal stroma by an ophthalmologist under microscopic guidance. The preferred site of injection may vary with the morphology of the individual lesion, but the goal of the administration would be to place the composition at the advancing front of the vasculature (i.e., interspersed between the blood vessels and the normal cornea). In most cases this would involve perilimbic corneal injection to “protect” the cornea from the advancing blood vessels. This method may also be utilized shortly after a corneal insult in order to prophylactically prevent corneal neovascularization. In this situation, the material could be injected in the perilimbic cornea interspersed between the corneal lesion and its undesired potential limbic blood supply. Such methods may also be utilized in a similar fashion to prevent capillary invasion of transplanted corneas. In a sustained-release form, injections might only be required 2-3 times per year. A steroid could also be added to the injection solution to reduce inflammation resulting from the injection itself.

[0623] Within another aspect of the present invention, methods are provided for treating neovascular glaucoma, comprising the step of administering to a patient a therapeutically effective amount of a polynucleotide, polypeptide, antagonist and/or agonist to the eye, such that the formation of blood vessels is inhibited. In one embodiment, the compound may be administered topically to the eye in order to treat early forms of neovascular glaucoma. Within other embodiments, the compound may be implanted by injection into the region of the anterior chamber angle. Within other embodiments, the compound may also be placed in any location such that the compound is continuously released into the aqueous humor. Within another aspect of the present invention, methods are provided for treating proliferative diabetic retinopathy, comprising the step of administering to a patient a therapeutically effective amount of a polynucleotide, polypeptide, antagonist and/or agonist to the eyes, such that the formation of blood vessels is inhibited.

[0624] Within particularly preferred embodiments of the invention, proliferative diabetic retinopathy may be treated by injection into the aqueous humor or the vitreous, in order to increase the local concentration of the polynucleotide, polypeptide, antagonist and/or agonist in the retina. Preferably, this treatment should be initiated prior to the acquisition of severe disease requiring photocoagulation.

[0625] Within another aspect of the present invention, methods are provided for treating retrolental fibroplasia, comprising the step of administering to a patient a therapeutically effective amount of a polynucleotide, polypeptide, antagonist and/or agonist to the eye, such that the formation of blood vessels is inhibited. The compound may be administered topically, via intravitreous injection and/or via intraocular implants.

[0626] Additionally, disorders which can be treated with the polynucleotides, polypeptides, agonists and/or agonists include, but are not limited to, hemangioma, arthritis, psoriasis, angiofibroma, atherosclerotic plaques, delayed wound healing, granulations, hemophilic joints, hypertrophic scars, nonunion fractures, Osler-Weber syndrome, pyogenic granuloma, scleroderma, trachoma, and vascular adhesions.

[0627] Moreover, disorders and/or states, which can be treated, prevented, diagnosed and/or prognosed with the polynucleotides, polypeptides, agonists and/or agonists of the invention include, but are not limited to, solid tumors, blood born tumors such as leukemias, tumor metastasis, Kaposi's sarcoma, benign tumors, for example hemangiomas, acoustic neuromas, neurofibromas, trachomas, and pyogenic granulomas, rheumatoid arthritis, psoriasis, ocular angiogenic diseases, for example, diabetic retinopathy, retinopathy of prematurity, macular degeneration, corneal graft rejection, neovascular glaucoma, retrolental fibroplasia, rubeosis, retinoblastoma, and uvietis, delayed wound healing, endometriosis, vascluogenesis, granulations, hypertrophic scars (keloids), nonunion fractures, scleroderma, trachoma, vascular adhesions, myocardial angiogenesis, coronary collaterals, cerebral collaterals, arteriovenous malformations, ischemic limb angiogenesis, Osler-Webber Syndrome, plaque neovascularization, telangiectasia, hemophiliac joints, angiofibroma fibromuscular dysplasia, wound granulation, Crohn's disease, atherosclerosis, birth control agent by preventing vascularization required for embryo implantation controlling menstruation, diseases that have angiogenesis as a pathologic consequence such as cat scratch disease (Rochele minalia quintosa), ulcers (Helicobacter pylori), Bartonellosis and bacillary angiomatosis.

[0628] In one aspect of the birth control method, an amount of the compound sufficient to block embryo implantation is administered before or after intercourse and fertilization have occurred, thus providing an effective method of birth control, possibly a “morning after” method. Polynucleotides, polypeptides, agonists and/or agonists may also be used in controlling menstruation or administered as either a peritoneal lavage fluid or for peritoneal implantation in the treatment of endometriosis.

[0629] Polynucleotides, polypeptides, agonists and/or agonists of the present invention may be incorporated into surgical sutures in order to prevent stitch granulomas.

[0630] Polynucleotides, polypeptides, agonists and/or agonists may be utilized in a wide variety of surgical procedures. For example, within one aspect of the present invention a compositions (in the form of, for example, a spray or film) may be utilized to coat or spray an area prior to removal of a tumor, in order to isolate normal surrounding tissues from malignant tissue, and/or to prevent the spread of disease to surrounding tissues. Within other aspects of the present invention, compositions (e.g., in the form of a spray) may be delivered via endoscopic procedures in order to coat tumors, or inhibit angiogenesis in a desired locale. Within yet other aspects of the present invention, surgical meshes, which have been coated with anti-angiogenic compositions of the present invention may be utilized in any procedure wherein a surgical mesh might be utilized. For example, within one embodiment of the invention a surgical mesh laden with an anti-angiogenic composition may be utilized during abdominal cancer resection surgery (e.g., subsequent to colon resection) in order to provide support to the structure, and to release an amount of the anti-angiogenic factor.

[0631] Within further aspects of the present invention, methods are provided for treating tumor excision sites, comprising administering a polynucleotide, polypeptide, agonist and/or agonist to the resection margins of a tumor subsequent to excision, such that the local recurrence of cancer and the formation of new blood vessels at the site is inhibited. Within one embodiment of the invention, the anti-angiogenic compound is administered directly to the tumor excision site (e.g., applied by swabbing, brushing or otherwise coating the resection margins of the tumor with the anti-angiogenic compound). Alternatively, the anti-angiogenic compounds may be incorporated into known surgical pastes prior to administration. Within particularly preferred embodiments of the invention, the anti-angiogenic compounds are applied after hepatic resections for malignancy, and after neurosurgical operations.

[0632] Within one aspect of the present invention, polynucleotides, polypeptides, agonists and/or agonists may be administered to the resection margin of a wide variety of tumors, including for example, breast, colon, brain and hepatic tumors. For example, within one embodiment of the invention, anti-angiogenic compounds may be administered to the site of a neurological tumor subsequent to excision, such that the formation of new blood vessels at the site are inhibited.

[0633] The polynucleotides, polypeptides, agonists and/or agonists of the present invention may also be administered along with other anti-angiogenic factors. Representative examples of other anti-angiogenic factors include: Anti-Invasive Factor, retinoic acid and derivatives thereof, paclitaxel, Suramin, Tissue Inhibitor of Metalloproteinase-1, Tissue Inhibitor of Metalloproteinase-2, Plasminogen Activator Inhibitor-1, Plasminogen Activator Inhibitor-2, and various forms of the lighter “d group” transition metals.

[0634] Lighter “d group” transition metals include, for example, vanadium, molybdenum, tungsten, titanium, niobium, and tantalum species. Such transition metal species may form transition metal complexes. Suitable complexes of the above-mentioned transition metal species include oxo transition metal complexes.

[0635] Representative examples of vanadium complexes include oxo vanadium complexes such as vanadate and vanadyl complexes. Suitable vanadate complexes include metavanadate and orthovanadate complexes such as, for example, ammonium metavanadate, sodium metavanadate, and sodium orthovanadate. Suitable vanadyl complexes include, for example, vanadyl acetylacetonate and vanadyl sulfate including vanadyl sulfate hydrates such as vanadyl sulfate mono- and trihydrates.

[0636] Representative examples of tungsten and molybdenum complexes also include oxo complexes. Suitable oxo tungsten complexes include tungstate and tungsten oxide complexes. Suitable tungstate complexes include ammonium tungstate, calcium tungstate, sodium tungstate dihydrate, and tungstic acid. Suitable tungsten oxides include tungsten (IV) oxide and tungsten (VI) oxide. Suitable oxo molybdenum complexes include molybdate, molybdenum oxide, and molybdenyl complexes. Suitable molybdate complexes include ammonium molybdate and its hydrates, sodium molybdate and its hydrates, and potassium molybdate and its hydrates. Suitable molybdenum oxides include molybdenum (VI) oxide, molybdenum (VI) oxide, and molybdic acid. Suitable molybdenyl complexes include, for example, molybdenyl acetylacetonate. Other suitable tungsten and molybdenum complexes include hydroxo derivatives derived from, for example, glycerol, tartaric acid, and sugars.

[0637] A wide variety of other anti-angiogenic factors may also be utilized within the context of the present invention. Representative examples include platelet factor 4; protamine sulphate; sulphated chitin derivatives (prepared from queen crab shells), (Murata et al., Cancer Res. 51:22-26 (1991)); Sulphated Polysaccharide Peptidoglycan Complex (SP-PG) (the function of this compound may be enhanced by the presence of steroids such as estrogen, and tamoxifen citrate); Staurosporine; modulators of matrix metabolism, including for example, proline analogs, cishydroxyproline, d,L-3,4-dehydroproline, Thiaproline, alpha,alpha-dipyridyl, aminopropionitrile fumarate; 4-propyl-5-(4-pyridinyl)-2(3H)-oxazolone; Methotrexate; Mitoxantrone; Heparin; Interferons; 2 Macroglobulin-serum; ChIMP-3 (Pavloff et al., J. Bio. Chem. 267:17321-17326 (1992)); Chymostatin (Tomkinson et al., Biochem J. 286:475-480 (1992)); Cyclodextrin Tetradecasulfate; Eponemycin; Camptothecin; Fumagillin (Ingber et al., Nature 348:555-557 (1990)); Gold Sodium Thiomalate (“GST”; Matsubara and Ziff, J. Clin. Invest. 79:1440-1446 (1987)); anticollagenase-serum; alpha2-antiplasmin (Holmes et al., J. Biol. Chem. 262(4):1659-1664 (1987)); Bisantrene (National Cancer Institute); Lobenzarit disodium (N-(2)-carboxyphenyl-4-chloroanthronilic acid disodium or “CCA”; Takeuchi et al., Agents Actions 36:312-316, 1992); Thalidomide; Angostatic steroid; AGM-1470; carboxynaminolmidazole; and metalloproteinase inhibitors such as BB94.

[0638] Musculoskeletal System Disorders

[0639] Polynucleotides, polypeptides, antibodies, and/or agonists or antagonists of the present invention, may be used to treat, prevent, diagnose, and/or prognose disorders of the musculoskeletal system, including but not limited to, disorders of the bone, joints, ligaments, tendons, bursa, muscle, and/or neoplasms and cancers associated with musculoskeletal tissue.

[0640] Diseases or disorders of the bone include, but are not limited to, Albers-Schonberg disease, bowlegs, heel spurs, Köhler's bone disease, knock-knees, Legg-Calvé-Perthes disease, Marfan's syndrome, mucopolysaccharidoses, Osgood-Schlatter disease, osteochondroses, osteochondrodysplasia, osteomyelitis, osteopetroses, osteoporosis (postmenopausal, senile, and juvenile), Paget's disease, Scheuermann's disease, scoliosis, Sever's disease, and patellofemoral stress syndrome.

[0641] Joint diseases or disorders include, but are not limited to, ankylosing spondylitis, Behçet's syndrome, CREST syndrome, Ehlers-Danlos syndrome, infectious arthritis, discoid lupus erythematosus, systemic lupus erythematosus, Lyme disease, osteoarthritis, psoriatic arthritis, relapsing polychondrites, Reiter's syndrome, rheumatoid arthritis (adult and juvenile), scleroderma, and Still's disease.

[0642] Diseases or disorders affecting ligaments, tendons, or bursa include, but are not limited to, ankle sprain, bursitis, posterior Achilles tendon bursitis (Haglund's deformity), anterior Achilles tendon bursitis (Albert's disease), tendinitis, tenosynovitis, poplieus tendinitis, Achilles tendinitis, medial or lateral epicondylitis, rotator cuff tendinitis, spasmodic torticollis, and fibromyalgia syndrome.

[0643] Muscle diseases or disorders include, but are not limited to, Becker's muscular dystrophy, Duchenne's muscular dystrophy, Landouzy-Dejerine muscular dystrophy, Leyden-Möbius muscular dystrophy, Erb's muscular dystrophy, Charcot's joints, dermatomyositis, gout, pseudogout, glycogen storage diseases, Pompe's disease, mitochondrial myopathy, periodic paralysis, polymyalgia rheumatica, polymyositis, Steinert's disease, Thomsen's disease, anterolateral and posteromedial shin splints, posterior femoral muscle strain, and fibromyositis.

[0644] Musculoskeletal tissue may also develop cancers and/or neoplasms that include, but are not limited to, osteochondroma, benign chondroma, chondroblastoma, chondromyxoid fibroma, osteoid osteoma, giant cell tumor, multiple myeloma, osteosarcoma, fibrosarcoma, malignant fibrous histiocytoma, chondrosarcoma, Ewing's tumor, and malignant lymphoma of bone.

[0645] Neural Activity and Neurological Diseases

[0646] The polynucleotides, polypeptides and agonists or antagonists of the invention may be used for the diagnosis and/or treatment of diseases, disorders, damage or injury of the brain and/or nervous system. Nervous system disorders that can be treated with the compositions of the invention (e.g., polypeptides, polynucleotides, and/or agonists or antagonists), include, but are not limited to, nervous system injuries, and diseases or disorders which result in either a disconnection of axons, a diminution or degeneration of neurons, or demyelination. Nervous system lesions which may be treated in a patient (including human and non-human mammalian patients) according to the methods of the invention, include but are not limited to, the following lesions of either the central (including spinal cord, brain) or peripheral nervous systems: (1) ischemic lesions, in which a lack of oxygen in a portion of the nervous system results in neuronal injury or death, including cerebral infarction or ischemia, or spinal cord infarction or ischemia; (2) traumatic lesions, including lesions caused by physical injury or associated with surgery, for example, lesions which sever a portion of the nervous system, or compression injuries; (3) malignant lesions, in which a portion of the nervous system is destroyed or injured by malignant tissue which is either a nervous system associated malignancy or a malignancy derived from non-nervous system tissue; (4) infectious lesions, in which a portion of the nervous system is destroyed or injured as a result of infection, for example, by an abscess or associated with infection by human immunodeficiency virus, herpes zoster, or herpes simplex virus or with Lyme disease, tuberculosis, or syphilis; (5) degenerative lesions, in which a portion of the nervous system is destroyed or injured as a result of a degenerative process including but not limited to, degeneration associated with Parkinson's disease, Alzheimer's disease, Huntington's chorea, or amyotrophic lateral sclerosis (ALS); (6) lesions associated with nutritional diseases or disorders, in which a portion of the nervous system is destroyed or injured by a nutritional disorder or disorder of metabolism including, but not limited to, vitamin B12 deficiency, folic acid deficiency, Wernicke disease, tobacco-alcohol amblyopia, Marchiafava-Bignami disease (primary degeneration of the corpus callosum), and alcoholic cerebellar degeneration; (7) neurological lesions associated with systemic diseases including, but not limited to, diabetes (diabetic neuropathy, Bell's palsy), systemic lupus erythematosus, carcinoma, or sarcoidosis; (8) lesions caused by toxic substances including alcohol, lead, or particular neurotoxins; and (9) demyelinated lesions in which a portion of the nervous system is destroyed or injured by a demyelinating disease including, but not limited to, multiple sclerosis, human immunodeficiency virus-associated myelopathy, transverse myelopathy or various etiologies, progressive multifocal leukoencephalopathy, and central pontine myelinolysis.

[0647] In one embodiment, the polypeptides, polynucleotides, or agonists or antagonists of the invention are used to protect neural cells from the damaging effects of hypoxia. In a further preferred embodiment, the polypeptides, polynucleotides, or agonists or antagonists of the invention are used to protect neural cells from the damaging effects of cerebral hypoxia. According to this embodiment, the compositions of the invention are used to treat or prevent neural cell injury associated with cerebral hypoxia. In one non-exclusive aspect of this embodiment, the polypeptides, polynucleotides, or agonists or antagonists of the invention, are used to treat or prevent neural cell injury associated with cerebral ischemia. In another non-exclusive aspect of this embodiment, the polypeptides, polynucleotides, or agonists or antagonists of the invention are used to treat or prevent neural cell injury associated with cerebral infarction.

[0648] In another preferred embodiment, the polypeptides, polynucleotides, or agonists or antagonists of the invention are used to treat or prevent neural cell injury associated with a stroke. In a specific embodiment, the polypeptides, polynucleotides, or agonists or antagonists of the invention are used to treat or prevent cerebral neural cell injury associated with a stroke.

[0649] In another preferred embodiment, the polypeptides, polynucleotides, or agonists or antagonists of the invention are used to treat or prevent neural cell injury associated with a heart attack. In a specific embodiment, the polypeptides, polynucleotides, or agonists or antagonists of the invention are used to treat or prevent cerebral neural cell injury associated with a heart attack.

[0650] The compositions of the invention which are useful for treating or preventing a nervous system disorder may be selected by testing for biological activity in promoting the survival or differentiation of neurons. For example, and not by way of limitation, compositions of the invention which elicit any of the following effects may be useful according to the invention: (1) increased survival time of neurons in culture either in the presence or absence of hypoxia or hypoxic conditions; (2) increased sprouting of neurons in culture or in vivo; (3) increased production of a neuron-associated molecule in culture or in vivo, e.g., choline acetyltransferase or acetylcholinesterase with respect to motor neurons; or (4) decreased symptoms of neuron dysfunction in vivo. Such effects may be measured by any method known in the art. In preferred, non-limiting embodiments, increased survival of neurons may routinely be measured using a method set forth herein or otherwise known in the art, such as, for example, in Zhang et al., Proc Natl Acad Sci USA 97:3637-42 (2000) or in Arakawa et al., J. Neurosci., 10:3507-15 (1990); increased sprouting of neurons may be detected by methods known in the art, such as, for example, the methods set forth in Pestronk et al., Exp. Neurol., 70:65-82 (1980), or Brown et al., Ann. Rev. Neurosci., 4:17-42 (1981); increased production of neuron-associated molecules may be measured by bioassay, enzymatic assay, antibody binding, Northern blot assay, etc., using techniques known in the art and depending on the molecule to be measured; and motor neuron dysfunction may be measured by assessing the physical manifestation of motor neuron disorder, e.g., weakness, motor neuron conduction velocity, or functional disability.

[0651] In specific embodiments, motor neuron disorders that may be treated according to the invention include, but are not limited to, disorders such as infarction, infection, exposure to toxin, trauma, surgical damage, degenerative disease or malignancy that may affect motor neurons as well as other components of the nervous system, as well as disorders that selectively affect neurons such as amyotrophic lateral sclerosis, and including, but not limited to, progressive spinal muscular atrophy, progressive bulbar palsy, primary lateral sclerosis, infantile and juvenile muscular atrophy, progressive bulbar paralysis of childhood (Fazio-Londe syndrome), poliomyelitis and the post polio syndrome, and Hereditary Motorsensory Neuropathy (Charcot-Marie-Tooth Disease).

[0652] Further, polypeptides or polynucleotides of the invention may play a role in neuronal survival; synapse formation; conductance; neural differentiation, etc. Thus, compositions of the invention (including polynucleotides, polypeptides, and agonists or antagonists) may be used to diagnose and/or treat or prevent diseases or disorders associated with these roles, including, but not limited to, learning and/or cognition disorders. The compositions of the invention may also be useful in the treatment or prevention of neurodegenerative disease states and/or behavioural disorders. Such neurodegenerative disease states and/or behavioral disorders include, but are not limited to, Alzheimer's Disease, Parkinson's Disease, Huntington's Disease, Tourette Syndrome, schizophrenia, mania, dementia, paranoia, obsessive compulsive disorder, panic disorder, learning disabilities, ALS, psychoses, autism, and altered behaviors, including disorders in feeding, sleep patterns, balance, and perception. In addition, compositions of the invention may also play a role in the treatment, prevention and/or detection of developmental disorders associated with the developing embryo, or sexually-linked disorders.

[0653] Additionally, polypeptides, polynucleotides and/or agonists or antagonists of the invention, may be useful in protecting neural cells from diseases, damage, disorders, or injury, associated with cerebrovascular disorders including, but not limited to, carotid artery diseases (e.g., carotid artery thrombosis, carotid stenosis, or Moyamoya Disease), cerebral amyloid angiopathy, cerebral aneurysm, cerebral anoxia, cerebral arteriosclerosis, cerebral arteriovenous malformations, cerebral artery diseases, cerebral embolism and thrombosis (e.g., carotid artery thrombosis, sinus thrombosis, or Wallenberg's Syndrome), cerebral hemorrhage (e.g., epidural or subdural -hematoma, or subarachnoid hemorrhage), cerebral infarction, cerebral ischemia (e.g., transient cerebral ischemia, Subclavian Steal Syndrome, or vertebrobasilar insufficiency), vascular dementia (e.g., multi-infarct), leukomalacia, periventricular, and vascular headache (e.g., cluster headache or migraines).

[0654] In accordance with yet a further aspect of the present invention, there is provided a process for utilizing polynucleotides or polypeptides, as well as agonists or antagonists of the present invention, for therapeutic purposes, for example, to stimulate neurological cell proliferation and/or differentiation. Therefore, polynucleotides, polypeptides, agonists and/or antagonists of the invention may be used to treat and/or detect neurologic diseases. Moreover, polynucleotides or polypeptides, or agonists or antagonists of the invention, can be used as a marker or detector of a particular nervous system disease or disorder.

[0655] Examples of neurologic diseases which can be treated or detected with polynucleotides, polypeptides, agonists, and/or antagonists of the present invention include brain diseases, such as metabolic brain diseases which includes phenylketonuria such as maternal phenylketonuria, pyruvate carboxylase deficiency, pyruvate dehydrogenase complex deficiency, Wernicke's Encephalopathy, brain edema, brain neoplasms such as cerebellar neoplasms which include infratentorial neoplasms, cerebral ventricle neoplasms such as choroid plexus neoplasms, hypothalamic neoplasms, supratentorial neoplasms, canavan disease, cerebellar diseases such as cerebellar ataxia which include spinocerebellar degeneration such as ataxia telangiectasia, cerebellar dyssynergia, Friederich's Ataxia, Machado-Joseph Disease, olivopontocerebellar atrophy, cerebellar neoplasms such as infratentorial neoplasms, diffuse cerebral sclerosis such as encephalitis periaxialis, globoid cell leukodystrophy, metachromatic leukodystrophy and subacute sclerosing panencephalitis.

[0656] Additional neurologic diseases which can be treated or detected with polynucleotides, polypeptides, agonists, and/or antagonists of the present invention include cerebrovascular disorders (such as carotid artery diseases which include carotid artery thrombosis, carotid stenosis and Moyamoya Disease), cerebral amyloid angiopathy, cerebral aneurysm, cerebral anoxia, cerebral arteriosclerosis, cerebral arteriovenous malformations, cerebral artery diseases, cerebral embolism and thrombosis such as carotid artery thrombosis, sinus thrombosis and Wallenberg's Syndrome, cerebral hemorrhage such as epidural hematoma, subdural hematoma and subarachnoid hemorrhage, cerebral infarction, cerebral ischemia such as transient cerebral ischemia, Subclavian Steal Syndrome and vertebrobasilar insufficiency, vascular dementia such as multi-infarct dementia, periventricular leukomalacia, vascular headache such as cluster headache and migraine.

[0657] Additional neurologic diseases which can be treated or detected with polynucleotides, polypeptides, agonists, and/or antagonists of the present invention include dementia such as AIDS Dementia Complex, presenile dementia such as Alzheimer's Disease and Creutzfeldt-Jakob Syndrome, senile dementia such as Alzheimer's Disease and progressive supranuclear palsy, vascular dementia such as multi-infarct dementia, encephalitis which include encephalitis periaxialis, viral encephalitis such as epidemic encephalitis, Japanese Encephalitis, St. Louis Encephalitis, tick-borne encephalitis and West Nile Fever, acute disseminated encephalomyelitis, meningoencephalitis such as uveomeningoencephalitic syndrome, Postencephalitic Parkinson Disease and subacute sclerosing panencephalitis, encephalomalacia such as periventricular leukomalacia, epilepsy such as generalized epilepsy which includes infantile spasms, absence epilepsy, myoclonic epilepsy which includes NERRF Syndrome, tonic-clonic epilepsy, partial epilepsy such as complex partial epilepsy, frontal lobe epilepsy and temporal lobe epilepsy, post-traumatic epilepsy, status epilepticus such as Epilepsia Partialis Continua, and Hallervorden-Spatz Syndrome.

[0658] Additional neurologic diseases which can be treated or detected with polynucleotides, polypeptides, agonists, and/or antagonists of the present invention include hydrocephalus such as Dandy-Walker Syndrome and normal pressure hydrocephalus, hypothalamic diseases such as hypothalamic neoplasms, cerebral malaria, narcolepsy which includes cataplexy, bulbar poliomyelitis, cerebri pseudotumor, Rett Syndrome, Reye's Syndrome, thalamic diseases, cerebral toxoplasmosis, intracranial tuberculoma and Zellweger Syndrome, central nervous system infections such as AIDS Dementia Complex, Brain Abscess, subdural empyema, encephalomyelitis such as Equine Encephalomyelitis, Venezuelan Equine Encephalomyelitis, Necrotizing Hemorrhagic Encephalomyelitis, Visna, and cerebral malaria.

[0659] Additional neurologic diseases which can be treated or detected with polynucleotides, polypeptides, agonists, and/or antagonists of the present invention include meningitis such as arachnoiditis, aseptic meningtitis such as viral meningtitis which includes lymphocytic choriomeningitis, Bacterial meningtitis which includes Haemophilus Meningtitis, Listeria Meningtitis, Meningococcal Meningtitis such as Waterhouse-Friderichsen Syndrome, Pneumococcal Meningtitis and meningeal tuberculosis, fungal meningitis such as Cryptococcal Meningtitis, subdural effusion, meningoencephalitis such as uvemeningoencephalitic syndrome, myelitis such as transverse myelitis, neurosyphilis such as tabes dorsalis, poliomyelitis which includes bulbar poliomyelitis and postpoliomyelitis syndrome, prion diseases (such as Creutzfeldt-Jakob Syndrome, Bovine Spongiform Encephalopathy, Gerstmann-Straussler Syndrome, Kuru, Scrapie), and cerebral toxoplasmosis.

[0660] Additional neurologic diseases which can be treated or detected with polynucleotides, polypeptides, agonists, and/or antagonists of the present invention include central nervous system neoplasms such as brain neoplasms that include cerebellar neoplasms such as infratentorial neoplasms, cerebral ventricle neoplasms such as choroid plexus neoplasms, hypothalamic neoplasms and supratentorial neoplasms, meningeal neoplasms, spinal cord neoplasms which include epidural neoplasms, demyelinating diseases such as Canavan Diseases, diffuse cerebral sceloris which includes adrenoleukodystrophy, encephalitis periaxialis, globoid cell leukodystrophy, diffuse cerebral sclerosis such as metachromatic leukodystrophy, allergic encephalomyelitis, necrotizing hemorrhagic encephalomyelitis, progressive multifocal leukoencephalopathy, multiple sclerosis, central pontine myelinolysis, transverse myelitis, neuromyelitis optica, Scrapie, Swayback, Chronic Fatigue Syndrome, Visna, High Pressure Nervous Syndrome, Meningism, spinal cord diseases such as amyotonia congenita, amyotrophic lateral sclerosis, spinal muscular atrophy such as Werdnig-Hoffmann Disease, spinal cord compression, spinal cord neoplasms such as epidural neoplasms, syringomyelia, Tabes Dorsalis, Stiff-Man Syndrome, mental retardation such as Angelman Syndrome, Cri-du-Chat Syndrome, De Lange's Syndrome, Down Syndrome, Gangliosidoses such as gangliosidoses G(M1), Sandhoff Disease, Tay-Sachs Disease, Hartnup Disease, homocystinuria, Laurence-Moon-Biedl Syndrome, Lesch-Nyhan Syndrome, Maple Syrup Urine Disease, mucolipidosis such as fucosidosis, neuronal ceroid-lipofuscinosis, oculocerebrorenal syndrome, phenylketonuria such as maternal phenylketonuria, Prader-Willi Syndrome, Rett Syndrome, Rubinstein-Taybi Syndrome, Tuberous Sclerosis, WAGR Syndrome, nervous system abnormalities such as holoprosencephaly, neural tube defects such as anencephaly which includes hydrangencephaly, Arnold-Chairi Deformity, encephalocele, meningocele, meningomyelocele, spinal dysraphism such as spina bifida cystica and spina bifida occulta.

[0661] Additional neurologic diseases which can be treated or detected with polynucleotides, polypeptides, agonists, and/or antagonists of the present invention include hereditary motor and sensory neuropathies which include Charcot-Marie Disease, Hereditary optic atrophy, Refsum's Disease, hereditary spastic paraplegia, Werdnig-Hoffmann Disease, Hereditary Sensory and Autonomic Neuropathies such as Congenital Analgesia and Familial Dysautonomia, Neurologic manifestations (such as agnosia that include Gerstmann's Syndrome, Amnesia such as retrograde amnesia, apraxia, neurogenic bladder, cataplexy, communicative disorders such as hearing disorders that includes deafness, partial hearing loss, loudness recruitment and tinnitus, language disorders such as aphasia which include agraphia, anomia, broca aphasia, and Wemicke Aphasia, Dyslexia such as Acquired Dyslexia, language development disorders, speech disorders such as aphasia which includes anomia, broca aphasia and Wemicke Aphasia, articulation disorders, communicative disorders such as speech disorders which include dysarthria, echolalia, mutism and stuttering, voice disorders such as aphonia and hoarseness, decerebrate state, delirium, fasciculation, hallucinations, meningism, movement disorders such as angelman syndrome, ataxia, athetosis, chorea, dystonia, hypokinesia, muscle hypotonia, myoclonus, tic, torticollis and tremor, muscle hypertonia such as muscle rigidity such as stiff-man syndrome, muscle spasticity, paralysis such as facial paralysis which includes Herpes Zoster Oticus, Gastroparesis, Hemiplegia, ophthalmoplegia such as diplopia, Duane's Syndrome, Homer's Syndrome, Chronic progressive external ophthalmoplegia such as Kearns Syndrome, Bulbar Paralysis, Tropical Spastic Paraparesis, Paraplegia such as Brown-Sequard Syndrome, quadriplegia, respiratory paralysis and vocal cord paralysis, paresis, phantom limb, taste disorders such as ageusia and dysgeusia, vision disorders such as amblyopia, blindness, color vision defects, diplopia, hemianopsia, scotoma and subnormal vision, sleep disorders such as hypersomnia which includes Kleine-Levin Syndrome, insomnia, and somnambulism, spasm such as trismus, unconsciousness such as coma, persistent vegetative state and syncope and vertigo, neuromuscular diseases such as amyotonia congenita, amyotrophic lateral sclerosis, Lambert-Eaton Myasthenic Syndrome, motor neuron disease, muscular atrophy such as spinal muscular atrophy, Charcot-Marie Disease and Werdnig-Hoffmann Disease, Postpoliomyelitis Syndrome, Muscular Dystrophy, Myasthenia Gravis, Myotonia Atrophica, Myotonia Confenita, Nemaline Myopathy, Familial Periodic Paralysis, Multiplex Paramyloclonus, Tropical Spastic Paraparesis and Stiff-Man Syndrome, peripheral nervous system diseases such as acrodynia, amyloid neuropathies, autonomic nervous system diseases such as Adie's Syndrome, Barre-Lieou Syndrome, Familial Dysautonomia, Homer's Syndrome, Reflex Sympathetic Dystrophy and Shy-Drager Syndrome, Cranial Nerve Diseases such as Acoustic Nerve Diseases such as Acoustic Neuroma which includes Neurofibromatosis 2, Facial Nerve Diseases such as Facial Neuralgia, Melkersson-Rosenthal Syndrome, ocular motility disorders which includes amblyopia, nystagmus, oculomotor nerve paralysis, ophthalmoplegia such as Duane's Syndrome, Horner's Syndrome, Chronic Progressive External Ophthalmoplegia which includes Kearns Syndrome, Strabismus such as Esotropia and Exotropia, Oculomotor Nerve Paralysis, Optic Nerve Diseases such as Optic Atrophy which includes Hereditary Optic Atrophy, Optic Disk Drusen, Optic Neuritis such as Neuromyelitis Optica, Papilledema, Trigeminal Neuralgia, Vocal Cord Paralysis, Demyelinating Diseases such as Neuromyelitis Optica and Swayback, and Diabetic neuropathies such as diabetic foot.

[0662] Additional neurologic diseases which can be treated or detected with polynucleotides, polypeptides, agonists, and/or antagonists of the present invention include nerve compression syndromes such as carpal tunnel syndrome, tarsal tunnel syndrome, thoracic outlet syndrome such as cervical rib syndrome, ulnar nerve compression syndrome, neuralgia such as causalgia, cervico-brachial neuralgia, facial neuralgia and trigeminal neuralgia, neuritis such as experimental allergic neuritis, optic neuritis, polyneuritis, polyradiculoneuritis and radiculities such as polyradiculitis, hereditary motor and sensory neuropathies such as Charcot-Marie Disease, Hereditary Optic Atrophy, Refsum's Disease, Hereditary Spastic Paraplegia and Werdnig-Hoffmann Disease, Hereditary Sensory and Autonomic Neuropathies which include Congenital Analgesia and Familial Dysautonomia, POEMS Syndrome, Sciatica, Gustatory Sweating and Tetany).

[0663] Endocrine Disorders

[0664] Polynucleotides or polypeptides, or agonists or antagonists of the present invention, may be used to treat, prevent, diagnose, and/or prognose disorders and/or diseases related to hormone imbalance, and/or disorders or diseases of the endocrine system.

[0665] Hormones secreted by the glands of the endocrine system control physical growth, sexual function, metabolism, and other functions. Disorders may be classified in two ways: disturbances in the production of hormones, and the inability of tissues to respond to hormones. The etiology of these hormone imbalance or endocrine system diseases, disorders or conditions may be genetic, somatic, such as cancer and some autoimmune diseases, acquired (e.g., by chemotherapy, injury or toxins), or infectious. Moreover, polynucleotides, polypeptides, antibodies, and/or agonists or antagonists of the present invention can be used as a marker or detector of a particular disease or disorder related to the endocrine system and/or hormone imbalance.

[0666] Endocrine system and/or hormone imbalance and/or diseases encompass disorders of uterine motility including, but not limited to: complications with pregnancy and labor (e.g., pre-term labor, post-term pregnancy, spontaneous abortion, and slow or stopped labor); and disorders and/or diseases of the menstrual cycle (e.g., dysmenorrhea and endometriosis).

[0667] Endocrine system and/or hormone imbalance disorders and/or diseases include disorders and/or diseases of the pancreas, such as, for example, diabetes mellitus, diabetes insipidus, congenital pancreatic agenesis, pheochromocytoma—islet cell tumor syndrome; disorders and/or diseases of the adrenal glands such as, for example, Addison's Disease, corticosteroid deficiency, virilizing disease, hirsutism, Cushing's Syndrome, hyperaldosteronism, pheochromocytoma; disorders and/or diseases of the pituitary gland, such as, for example, hyperpituitarism, hypopituitarism, pituitary dwarfism, pituitary adenoma, panhypopituitarism, acromegaly, gigantism; disorders and/or diseases of the thyroid, including but not limited to, hyperthyroidism, hypothyroidism, Plummer's disease, Graves' disease (toxic diffuse goiter), toxic nodular goiter, thyroiditis (Hashimoto's thyroiditis, subacute granulomatous thyroiditis, and silent lymphocytic thyroiditis), Pendred's syndrome, myxedema, cretinism, thyrotoxicosis, thyroid hormone coupling defect, thymic aplasia, Hurthle cell tumours of the thyroid, thyroid cancer, thyroid carcinoma, Medullary thyroid carcinoma; disorders and/or diseases of the parathyroid, such as, for example, hyperparathyroidism, hypoparathyroidism; disorders and/or diseases of the hypothalamus.

[0668] In addition, endocrine system and/or hormone imbalance disorders and/or diseases may also include disorders and/or diseases of the testes or ovaries, including cancer. Other disorders and/or diseases of the testes or ovaries further include, for example, ovarian cancer, polycystic ovary syndrome, Klinefelter's syndrome, vanishing testes syndrome (bilateral anorchia), congenital absence of Leydig's cells, cryptorchidism, Noonan's syndrome, myotonic dystrophy, capillary haemangioma of the testis (benign), neoplasias of the testis and neo-testis.

[0669] Moreover, endocrine system and/or hormone imbalance disorders and/or diseases may also include disorders and/or diseases such as, for example, polyglandular deficiency syndromes, pheochromocytoma, neuroblastoma, multiple Endocrine neoplasia, and disorders and/or cancers of endocrine tissues.

[0670] Gastrointestinal Disorders

[0671] Polynucleotides or polypeptides, or agonists or antagonists of the present invention, may be used to treat, prevent, diagnose, and/or prognose gastrointestinal disorders, including inflammatory diseases and/or conditions, infections, cancers (e.g., intestinal neoplasms (carcinoid tumor of the small intestine, non-Hodgkin's lymphoma of the small intestine, small bowl lymphoma)), and ulcers, such as peptic ulcers.

[0672] Gastrointestinal disorders include dysphagia, odynophagia, inflammation of the esophagus, peptic esophagitis, gastric reflux, submucosal fibrosis and stricturing, Mallory-Weiss lesions, leiomyomas, lipomas, epidermal cancers, adeoncarcinomas, gastric retention disorders, gastroenteritis, gastric atrophy, gastric/stomach cancers, polyps of the stomach, autoimmune disorders such as pernicious anemia, pyloric stenosis, gastritis (bacterial, viral, eosinophilic, stress-induced, chronic erosive, atrophic, plasma cell, and Menetrier's), and peritoneal diseases (e.g., chyloperioneum, hemoperitoneum, mesenteric cyst, mesenteric lymphadenitis, mesenteric vascular occlusion, panniculitis, neoplasms, peritonitis, pneumoperitoneum, bubphrenic abscess).

[0673] Gastrointestinal disorders also include disorders associated with the small intestine, such as malabsorption syndromes, distension, irritable bowel syndrome, sugar intolerance, celiac disease, duodenal ulcers, duodenitis, tropical sprue, Whipple's disease, intestinal lymphangiectasia, Crohn's disease, appendicitis, obstructions of the ileum, Meckel's diverticulum, multiple diverticula, failure of complete rotation of the small and large intestine, lymphoma, and bacterial and parasitic diseases (such as Traveler's diarrhea, typhoid and paratyphoid, cholera, infection by Roundworms (Ascariasis lumbricoides), Hookworms (Ancylostoma duodenale), Threadworms (Enterobius vennicularis), Tapeworms (Taenia saginata, Echinococcus granulosus, Diphyllobothrium spp., and T. solium).

[0674] Liver diseases and/or disorders include intrahepatic cholestasis (alagille syndrome, biliary liver cirrhosis), fatty liver (alcoholic fatty liver, reye syndrome), hepatic vein thrombosis, hepatolentricular degeneration, hepatomegaly, hepatopulmonary syndrome, hepatorenal syndrome, portal hypertension (esophageal and gastric varices), liver abscess (amebic liver abscess), liver cirrhosis (alcoholic, biliary and experimental), alcoholic liver diseases (fatty liver, hepatitis, cirrhosis), parasitic (hepatic echinococcosis, fascioliasis, amebic liver abscess), jaundice (hemolytic, hepatocellular, and cholestatic), cholestasis, portal hypertension, liver enlargement, ascites, hepatitis (alcoholic hepatitis, animal hepatitis, chronic hepatitis (autoimmune, hepatitis B, hepatitis C, hepatitis D, drug induced), toxic hepatitis, viral human hepatitis (hepatitis A, hepatitis B, hepatitis C, hepatitis D, hepatitis E), Wilson's disease, granulomatous hepatitis, secondary biliary cirrhosis, hepatic encephalopathy, portal hypertension, varices, hepatic encephalopathy, primary biliary cirrhosis, primary sclerosing cholangitis, hepatocellular adenoma, hemangiomas, bile stones, liver failure (hepatic encephalopathy, acute liver failure), and liver neoplasms (angiomyolipoma, calcified liver metastases, cystic liver metastases, epithelial tumors, fibrolamellar hepatocarcinoma, focal nodular hyperplasia, hepatic adenoma, hepatobiliary cystadenoma, hepatoblastoma, hepatocellular carcinoma, hepatoma, liver cancer, liver hemangioendothelioma, mesenchymal hamartoma, mesenchymal tumors of liver, nodular regenerative hyperplasia, benign liver tumors (Hepatic cysts [Simple cysts, Polycystic liver disease, Hepatobiliary cystadenoma, Choledochal cyst], Mesenchymal tumors [Mesenchymal hamartoma, Infantile hemangioendothelioma, Hemangioma, Peliosis hepatis, Lipomas, Inflammatory pseudotumor, Miscellaneous], Epithelial tumors [Bile duct epithelium (Bile duct hamartoma, Bile duct adenoma), Hepatocyte (Adenoma, Focal nodular hyperplasia, Nodular regenerative hyperplasia)], malignant liver tumors [hepatocellular, hepatoblastoma, hepatocellular carcinoma, cholangiocellular, cholangiocarcinoma, cystadenocarcinoma, tumors of blood vessels, angiosarcoma, Karposi's sarcoma, hemangioendothelioma, other tumors, embryonal sarcoma, fibrosarcoma, leiomyosarcoma, rhabdomyosarcoma, carcinosarcoma, teratoma, carcinoid, squamous carcinoma, primary lymphoma]), peliosis hepatis, erythrohepatic porphyria, hepatic porphyria (acute intermittent porphyria, porphyria cutanea tarda), Zellweger syndrome).

[0675] Pancreatic diseases and/or disorders include acute pancreatitis, chronic pancreatitis (acute necrotizing pancreatitis, alcoholic pancreatitis), neoplasms (adenocarcinoma of the pancreas, cystadenocarcinoma, insulinoma, gastrinoma, and glucagonoma, cystic neoplasms, islet-cell tumors, pancreoblastoma), and other pancreatic diseases (e.g., cystic fibrosis, cyst (pancreatic pseudocyst, pancreatic fistula, insufficiency)).

[0676] Gallbladder diseases include gallstones (cholelithiasis and choledocholithiasis), postcholecystectomy syndrome, diverticulosis of the gallbladder, acute cholecystitis, chronic cholecystitis, bile duct tumors, and mucocele.

[0677] Diseases and/or disorders of the large intestine include antibiotic-associated colitis, diverticulitis, ulcerative colitis, acquired megacolon, abscesses, fungal and bacterial infections, anorectal disorders (e.g., fissures, hemorrhoids), colonic diseases (colitis, colonic neoplasms [colon cancer, adenomatous colon polyps (e.g., villous adenoma), colon carcinoma, colorectal cancer], colonic diverticulitis, colonic diverticulosis, megacolon [Hirschsprung disease, toxic megacolon]; sigmoid diseases [proctocolitis, sigmoin neoplasms]), constipation, Crohn's disease, diarrhea (infantile diarrhea, dysentery), duodenal diseases (duodenal neoplasms, duodenal obstruction, duodenal ulcer, duodenitis), enteritis (enterocolitis), HIV enteropathy, ileal diseases (ileal neoplasms, ileitis), immunoproliferative small intestinal disease, inflammatory bowel disease (ulcerative colitis, Crohn's disease), intestinal atresia, parasitic diseases (anisakiasis, balantidiasis, blastocystis infections, cryptosporidiosis, dientamoebiasis, amebic dysentery, giardiasis), intestinal fistula (rectal fistula), intestinal neoplasms (cecal neoplasms, colonic neoplasms, duodenal neoplasms, ileal neoplasms, intestinal polyps, jejunal neoplasms, rectal neoplasms), intestinal obstruction (afferent loop syndrome, duodenal obstruction, impacted feces, intestinal pseudo-obstruction [cecal volvulus], intussusception), intestinal perforation, intestinal polyps (colonic polyps, gardner syndrome, peutz-jeghers syndrome), jejunal diseases (jejunal neoplasms), malabsorption syndromes (blind loop syndrome, celiac disease, lactose intolerance, short bowl syndrome, tropical sprue, whipple's disease), mesenteric vascular occlusion, pneumatosis cystoides intestinalis, protein-losing enteropathies (intestinal lymphagiectasis), rectal diseases (anus diseases, fecal incontinence, hemorrhoids, proctitis, rectal fistula, rectal prolapse, rectocele), peptic ulcer (duodenal ulcer, peptic esophagitis, hemorrhage, perforation, stomach ulcer, Zollinger-Ellison syndrome), postgastrectomy syndromes (dumping syndrome), stomach diseases (e.g., achlorhydria, duodenogastric reflux (bile reflux), gastric antral vascular ectasia, gastric fistula, gastric outlet obstruction, gastritis (atrophic or hypertrophic), gastroparesis, stomach dilatation, stomach diverticulum, stomach neoplasms (gastric cancer, gastric polyps, gastric adenocarcinoma, hyperplastic gastric polyp), stomach rupture, stomach ulcer, stomach volvulus), tuberculosis, visceroptosis, vomiting (e.g., hematemesis, hyperemesis gravidarum, postoperative nausea and vomiting) and hemorrhagic colitis.

[0678] Further diseases and/or disorders of the gastrointestinal system include biliary tract diseases, such as, gastroschisis, fistula (e.g., biliary fistula, esophageal fistula, gastric fistula, intestinal fistula, pancreatic fistula), neoplasms (e.g., biliary tract neoplasms, esophageal neoplasms, such as adenocarcinoma of the esophagus, esophageal squamous cell carcinoma, gastrointestinal neoplasms, pancreatic neoplasms, such as adenocarcinoma of the pancreas, mucinous cystic neoplasm of the pancreas, pancreatic cystic neoplasms, pancreatoblastoma, and peritoneal neoplasms), esophageal disease (e.g., bullous diseases, candidiasis, glycogenic acanthosis, ulceration, barrett esophagus varices, atresia, cyst, diverticulum (e.g., Zenker's diverticulum), fistula (e.g., tracheoesophageal fistula), motility disorders (e.g., CREST syndrome, deglutition disorders, achalasia, spasm, gastroesophageal reflux), neoplasms, perforation (e.g., Boerhaave syndrome, Mallory-Weiss syndrome), stenosis, esophagitis, diaphragmatic hernia (e.g., hiatal hernia); gastrointestinal diseases, such as, gastroenteritis (e.g., cholera morbus, norwalk virus infection), hemorrhage (e.g., hematemesis, melena, peptic ulcer hemorrhage), stomach neoplasms (gastric cancer, gastric polyps, gastric adenocarcinoma, stomach cancer)), hernia (e.g., congenital diaphragmatic hernia, femoral hernia, inguinal hernia, obturator hernia, umbilical hernia, ventral hernia), and intestinal diseases (e.g., cecal diseases (appendicitis, cecal neoplasms)).

[0679] Developmental and Inherited Disorders

[0680] Polynuceotides or polypeptides, or agonists or antagonists of the present invention may be used to treat, prevent, diagnose, and/or prognose diseases associated with mixed fetal tissues, including, but not limited to, developmental and inherited disorders or defects of the nervous system, musculoskelelal system, execretory system, cardiovascular system, hematopoietic system, gastrointestinal system, reproductive system, and respiratory system. Compositions of the present invention may also be used to treat, prevent, diagnose, and/or prognose developmental and inherited disorders or defects associated with, but not limited to, skin, hair, visual, and auditory tissues, metabolism. Additionally, the compositions of the invention may be useful in the diagnosis, treatment, and/or prevention of disorders or diseases associated with, but not limited to, chromosomal or genetic abnormalities and hyperproliferation or neoplasia.

[0681] Disorders or defects of the nervous system associated with developmental or inherited abnormalities that may be diagnosed, treated, and/or prevented with the compostions of the invention include, but are not limited to, adrenoleukodystrophy, agenesis of corpus callosum, Alexander disease, anencephaly, Angelman syndrome, Arnold-Chiari deformity, Batten disease, Canavan disease, cephalic disorders, Charcot-Marie-Tooth disease, encephalocele, Friedreich's ataxia, Gaucher's disease, Gorlin syndrome, Hallervorden-Spatz disease, hereditary spastic paraplegia, Huntington disease, hydranencephaly, hydrocephalus, Joubert syndrome, Lesch-Nyhan syndrome, leukodystrophy, Menkes disease, microcephaly, Niemann-Pick Type C1, neurofibromatosis, porencephaly, progeria, proteus syndrome, Refsum disease, spina bifida, Sturge-Weber syndrome, Tay-Sachs disease, tuberous sclerosis, and von Hippel-Lindau disease.

[0682] Developmental and inherited disorders resulting in disorders or defects of the musculoskeletal system that may be diagnosed, treated, and/or prevented with the compositions of the invention include, but are not limited to, achondroplasia, atlanto-occipital fusion, arthrogryposis mulitplex congenita, autosomal recessive muscular dystrophy, Becker's muscular dystrophy, cerebral palsy, choanal atresia, cleft lip, cleft palate, clubfoot, congenital amputation, congenital dislocation of the hip, congenital torticollis, congenital scoliosis, dopa-repsonsive dystonia, Duchenne muscular dystrophy, early-onset generalized dystonia, femoral torsion, Gorlin syndrome, hypophosphatasia, Klippel-Feil syndrome, knee dislocation, myoclonic dystonia, myotonic dystrophy, nail-patella syndrome, osteogenesis imperfecta, paroxysmal dystonia, progeria, prune-belly syndrome, rapid-onset dystonia parkinsonism, scolosis, syndactyly, Treacher Collins' syndrome, velocardiofacial syndrome, and X-linked dystonia-parkinsonism.

[0683] Developmental or hereditary disorders or defects of the excretory system that may be diagnosed, treated, and/or prevented with the compositions of the invention include, but are not limited to, Alport's syndrome, Bartter's syndrome, bladder diverticula, bladder exstrophy, cystinuria, epispadias, Fanconi's syndrome, Hartnup disease, horseshoe kidney, hypospadias, kidney agenesis, kidney ectopia, kidney malrotation, Liddle's syndrome, medullary cystic disease, medullary sponge, multicystic kidney, kidney polycystic kidney disease, nail-patella syndrome, Potter's syndrome, urinary tract flow obstruction, vitamin D-resistant rickets, and Wilm's tumor.

[0684] Cardiovascular disorders or defects of developmental or hereditary origin that may be diagnosed, treated, and/or prevented with the compositions of the inventtion include, but are not limited to, aortic valve stenosis, atrial septal defects, artioventricular (A-V) canal defect, bicuspid aortic valve, coarctation or the aorta, dextrocardia, Ebstein's anomaly, Eisenmenger's complex, hypoplastic left heart syndrome, Marfan syndrome, patent ductus arteriosus, progeria, pulmonary atresia, pulmonary valve stenosis, subaortic stenosis, tetralogy of fallot, total anomalous pulmonary venous (P-V) connection, transposition of the great arteries, tricuspid atresia, truncus arteriosus, ventricular septal defects. Developmental or inherited disorders resulting in disorders involving the hematopoietic system that may be diagnosed, treated, and/or prevented with the compositions of the invention include, but not limited to, Bernard-Soulier syndrome, Chediak-Higashi syndrome, hemophilia, Hermansky-Pudlak syndrome, sickle cell anemia, storage pool disease, thromboxane A2 dysfunction, thrombasthenia, and von Willebrand's disease.

[0685] The compositions of the invention may also be used to diagnose, treat, and/or prevent developmental and inherited disorders resulting in disorders or defects of the gastrointestinal system, including, but not limited to, anal atresia, biliary atresia, esophageal atresia, diaphragmatic hernia, Hirschsprung's disease, Meckel's diverticulum, oligohydramnios, omphalocele, polyhydramnios, porphyria, situs inversus viscera. Developmental or inherited disorders resulting in metabolic disorders that may be diagnosed, treated, and/or prevented with the compositions of the invention include, but are not limited to, alpha-1 antitrypsin deficiency, cystic fibrosis, hemochromatosis, lysosomal storage disease, phenylketonuria, Wilson's disease, and Zellweger syndrome.

[0686] Disorders of the reproductive system that are developmentally or hereditary related that may also be diagnosed, treated, and/or prevented with the compositions of the invention include, but are not limited to, androgen insensitivity syndrome, ambiguous genitalia, autosomal sex reversal, congenital adreneal hyperplasia, gonadoblastoma, ovarian germ cell cancer, pseudohermphroditism, true hermaphroditism, undescended testis, XX male syndrome, and XY female type gonadal dysgenesis. The compositions of the invention may also be used to diagnose, treat, and/or prevent developmental or inherited respiratory defects including, but not limited to, askin tumor, azygos lobe, congenital diaphragmatic hernia, congenital lobar emphysema, cystic adenomatoid malformation, lobar emphysema, hyaline membrane disease, and pectus excavatum.

[0687] Developmental or inherited disorders may also result from chromosomal or genetic aberration that may be diagnosed, treated, and/or prevented with the compositions of the invention including, but not limited to, 4p-syndrome, cri du chat syndrome, Digeorge syndrome, Down's syndrome, Edward's syndrome, fragile X syndrome, Klinefelter's syndrome, Patau's syndrome, Prader-Willi syndrome, progeria, Turner's syndrome, triple X syndrome, and XYY syndrome. Other developmental disorders that can be diagnosed, treated, and/or prevented with the compositions of the invention, include, but are not limited to, fetal alcohol syndrome, and can be caused by environmental factors surrounding the developing fetus.

[0688] The compositions of the invention may further be able to be used to diagnose, treat, and/or prevent errors in development or a genetic disposition that may result in hyperproliferative disorders or neoplasms, including, but not limited to, acute childhood lymphoblastic leukemia, askin tumor, Beckwith-Wiedemann syndrome, childhood acute myeloid leukemia, childhood brain stem glioma, childhood cerebellar astrocytoma, childhood extracranial germ cell tumors childhood (primary), gonadoblastoma, hepatocellular cancer, childhood Hodgkin's disease, childhood Hodgkin's lymphoma, childhood hypothalamic and visual pathway glioma, childhood (primary) liver cancer, childhood lymphoblastic leukemia, childhood medulloblastoma, childhood non-Hodgkin's lymphoma, childhood pineal and supratentorial primitive neuroectodermal tumors, childhood primary liver cancer, childhood rhabdomyosarcoma, childhood soft tissue sarcoma, Gorlin syndrome, familial multiple endrocrine neoplasia type I, neuroblastoma, ovarian germ cell cancer, pheochromocytoma, retinoblastoma, and Wilm's tumor.

[0689] Polypeptides may be administered using any method known in the art, including, but not limited to, direct needle injection at the delivery site, intravenous injection, topical administration, catheter infusion, biolistic injectors, particle accelerators, gelfoam sponge depots, other commercially available depot materials, osmotic pumps, oral or suppositorial solid pharmaceutical formulations, decanting or topical applications during surgery, aerosol delivery. Such methods are known in the art. Polypeptides may be administered as part of a Therapeutic, described in more detail below. Methods of delivering polynucleotides are described in more detail herein.

[0690] Diseases at the Cellular Level

[0691] Diseases associated with increased cell survival or the inhibition of apoptosis that could be treated, prevented, diagnosed and/or prognosed using polynucleotides or polypeptides, as well as antagonists or agonists of the present invention, include cancers (such as follicular lymphomas, carcinomas with p53 mutations, and hormone-dependent tumors, including, but not limited to colon cancer, cardiac tumors, pancreatic cancer, melanoma, retinoblastoma, glioblastoma, lung cancer, intestinal cancer, testicular cancer, stomach cancer, neuroblastoma, myxoma, myoma, lymphoma, endothelioma, osteoblastoma, osteoclastoma, osteosarcoma, chondrosarcoma, adenoma, breast cancer, prostate cancer, Kaposi's sarcoma and ovarian cancer); autoimmune disorders (such as, multiple sclerosis, Sjogren's syndrome, Hashimoto's thyroiditis, biliary cirrhosis, Behcet's disease, Crohn's disease, polymyositis, systemic lupus erythematosus and immune-related glomerulonephritis and rheumatoid arthritis) and viral infections (such as herpes viruses, pox viruses and adenoviruses), inflammation, graft v. host disease, acute graft rejection, and chronic graft rejection.

[0692] In preferred embodiments, polynucleotides, polypeptides, and/or antagonists of the invention are used to inhibit growth, progression, and/or metastasis of cancers, in particular those [listed above] involving breast and ovarian tissues.

[0693] Additional diseases or conditions associated with increased cell survival that could be treated or detected by polynucleotides or polypeptides, or agonists or antagonists of the present invention include, but are not limited to, progression, and/or metastases of malignancies and related disorders such as leukemia (including acute leukemias (e.g., acute lymphocytic leukemia, acute myelocytic leukemia (including myeloblastic, promyelocytic, myelomonocytic, monocytic, and erythroleukemia)) and chronic leukemias (e.g., chronic myelocytic (granulocytic) leukemia and chronic lymphocytic leukemia)), polycythemia vera, lymphomas (e.g., Hodgkin's disease and non-Hodgkin's disease), multiple myeloma, Waldenstrom's macroglobulinemia, heavy chain disease, and solid tumors including, but not limited to, sarcomas and carcinomas such as fibrosarcoma, myxosarcoma, liposarcoma, chondrosarcoma, osteogenic sarcoma, chordoma, angiosarcoma, endotheliosarcoma, lymphangiosarcoma, lymphangioendotheliosarcoma, synovioma, mesothelioma, Ewing's tumor, leiomyosarcoma, rhabdomyosarcoma, colon carcinoma, pancreatic cancer, breast cancer, ovarian cancer, prostate cancer, squamous cell carcinoma, basal cell carcinoma, adenocarcinoma, sweat gland carcinoma, sebaceous gland carcinoma, papillary carcinoma, papillary adenocarcinomas, cystadenocarcinoma, medullary carcinoma, bronchogenic carcinoma, renal cell carcinoma, hepatoma, bile duct carcinoma, choriocarcinoma, seminoma, embryonal carcinoma, Wilm's tumor, cervical cancer, testicular tumor, lung carcinoma, small cell lung carcinoma, bladder carcinoma, epithelial carcinoma, glioma, astrocytoma, medulloblastoma, craniopharyngioma, ependymoma, pinealoma, hemangioblastoma, acoustic neuroma, oligodendroglioma, menangioma, melanoma, neuroblastoma, and retinoblastoma.

[0694] Diseases associated with increased apoptosis that could be treated, prevented, diagnosted, and/or prognosed using polynucleotides or polypeptides, as well as agonists or antagonists of the present invention, include, but are not limited to, AIDS; neurodegenerative disorders (such as Alzheimer's disease, Parkinson's disease, Amyotrophic lateral sclerosis, Retinitis pigmentosa, Cerebellar degeneration and brain tumor or prior associated disease); autoimmune disorders (such as, multiple sclerosis, Sjogren's syndrome, Hashimoto's thyroiditis, biliary cirrhosis, Behcet's disease, Crohn's disease, polymyositis, systemic lupus erythematosus and immune-related glomerulonephritis and rheumatoid arthritis) myelodysplastic syndromes (such as aplastic anernia), graft v. host disease, ischemic injury (such as that caused by myocardial infarction, stroke and reperfusion injury), liver injury (e.g., hepatitis related liver injury, ischemia/reperfusion injury, cholestosis (bile duct injury) and liver cancer); toxin-induced liver disease (such as that caused by alcohol), septic shock, cachexia and anorexia.

[0695] Wound Healing and Epithelial Cell Proliferation

[0696] In accordance with yet a further aspect of the present invention, there is provided a process for utilizing polynucleotides or polypeptides, as well as agonists or antagonists of the present invention, for therapeutic purposes, for example, to stimulate epithelial cell proliferation and basal keratinocytes for the purpose of wound healing, and to stimulate hair follicle production and healing of dermal wounds. Polynucleotides or polypeptides, as well as agonists or antagonists of the present invention, may be clinically useful in stimulating wound healing including surgical wounds, excisional wounds, deep wounds involving damage of the dermis and epidermis, eye tissue wounds, dental tissue wounds, oral cavity wounds, diabetic ulcers, dermal ulcers, cubitus ulcers, arterial ulcers, venous stasis ulcers, burns resulting from heat exposure or chemicals, and other abnormal wound healing conditions such as uremia, malnutrition, vitamin deficiencies and complications associated with systemic treatment with steroids, radiation therapy and antineoplastic drugs and antimetabolites. Polynucleotides or polypeptides, as well as agonists or antagonists of the present invention, could be used to promote dermal reestablishment subsequent to dermal loss.

[0697] Polynucleotides or polypeptides, as well as agonists or antagonists of the present invention, could be used to increase the adherence of skin grafts to a wound bed and to stimulate re-epithelialization from the wound bed. The following are types of grafts that polynucleotides or polypeptides, agonists or antagonists of the present invention, could be used to increase adherence to a wound bed: autografts, artificial skin, allografts, autodermic graft, autoepdermic grafts, avacular grafts, Blair-Brown grafts, bone graft, brephoplastic grafts, cutis graft, delayed graft, dermic graft, epidermic graft, fascia graft, full thickness graft, heterologous graft, xenograft, homologous graft, hyperplastic graft, lamellar graft, mesh graft, mucosal graft, Ollier-Thiersch graft, omenpal graft, patch graft, pedicle graft, penetrating graft, split skin graft, thick split graft. Polynucleotides or polypeptides, as well as agonists or antagonists of the present invention, can be used to promote skin strength and to improve the appearance of aged skin.

[0698] It is believed that polynucleotides or polypeptides, as well as agonists or antagonists of the present invention, will also produce changes in hepatocyte proliferation, and epithelial cell proliferation in the lung, breast, pancreas, stomach, small intestine, and large intestine. Polynucleotides or polypeptides, as well as agonists or antagonists of the present invention, could promote proliferation of epithelial cells such as sebocytes, hair follicles, hepatocytes, type II pneumocytes, mucin-producing goblet cells, and other epithelial cells and their progenitors contained within the skin, lung, liver, and gastrointestinal tract. Polynucleotides or polypeptides, agonists or antagonists of the present invention, may promote proliferation of endothelial cells, keratinocytes, and basal keratinocytes.

[0699] Polynucleotides or polypeptides, as well as agonists or antagonists of the present invention, could also be used to reduce the side effects of gut toxicity that result from radiation, chemotherapy treatments or viral infections. Polynucleotides or polypeptides, as well as agonists or antagonists of the present invention, may have a cytoprotective effect on the small intestine mucosa. Polynucleotides or polypeptides, as well as agonists or antagonists of the present invention, may also stimulate healing of mucositis (mouth ulcers) that result from chemotherapy and viral infections.

[0700] Polynucleotides or polypeptides, as well as agonists or antagonists of the present invention, could further be used in full regeneration of skin in full and partial thickness skin defects, including bums, (i.e., repopulation of hair follicles, sweat glands, and sebaceous glands), treatment of other skin defects such as psoriasis. Polynucleotides or polypeptides, as well as agonists or antagonists of the present invention, could be used to treat epidermolysis bullosa, a defect in adherence of the epidermis to the underlying dermis which results in frequent, open and painful blisters by accelerating reepithelialization of these lesions. Polynucleotides or polypeptides, as well as agonists or antagonists of the present invention, could also be used to treat gastric and doudenal ulcers and help heal by scar formation of the mucosal lining and regeneration of glandular mucosa and duodenal mucosal lining more rapidly. Inflammatory bowel diseases, such as Crohn's disease and ulcerative colitis, are diseases, which result in destruction of the mucosal surface of the small or large intestine, respectively. Thus, polynucleotides or polypeptides, as well as agonists or antagonists of the present invention, could be used to promote the resurfacing of the mucosal surface to aid more rapid healing and to prevent progression of inflammatory bowel disease. Treatment with polynucleotides or polypeptides, agonists or antagonists of the present invention, is expected to have a significant effect on the production of mucus throughout the gastrointestinal tract and could be used to protect the intestinal mucosa from injurious substances that are ingested or following surgery. Polynucleotides or polypeptides, as well as agonists or antagonists of the present invention, could be used to treat diseases associate with the under expression.

[0701] Moreover, polynucleotides or polypeptides, as well as agonists or antagonists of the present invention, could be used to prevent and heal damage to the lungs due to various pathological states. Polynucleotides or polypeptides, as well as agonists or antagonists of the present invention, could stimulate proliferation and differentiation and promote the repair of alveoli and brochiolar epithelium to prevent or treat acute or chronic lung damage. For example, emphysema, which results in the progressive loss of aveoli, and inhalation injuries, i.e., resulting from smoke inhalation and burns, that cause necrosis of the bronchiolar epithelium and alveoli could be effectively treated using polynucleotides or polypeptides, agonists or antagonists of the present invention. Also, polynucleotides or polypeptides, as well as agonists or antagonists of the present invention, could be used to stimulate the proliferation of and differentiation of type II pneumocytes, which may help treat or prevent disease such as hyaline membrane diseases, such as infant respiratory distress syndrome and bronchopulmonary displasia, in premature infants.

[0702] Polynucleotides or polypeptides, as well as agonists or antagonists of the present invention, could stimulate the proliferation and differentiation of hepatocytes and, thus, could be used to alleviate or treat liver diseases and pathologies such as fulminant liver failure caused by cirrhosis, liver damage caused by viral hepatitis and toxic substances (i.e., acetaminophen, carbon tetraholoride and other hepatotoxins known in the art).

[0703] In addition, polynucleotides or polypeptides, as well as agonists or antagonists of the present invention, could be used treat or prevent the onset of diabetes mellitus. In patients with newly diagnosed Types I and II diabetes, where some islet cell function remains, polynucleotides or polypeptides, as well as agonists or antagonists of the present invention, could be used to maintain the islet function so as to alleviate, delay or prevent permanent manifestation of the disease. Also, polynucleotides or polypeptides, as well as agonists or antagonists -of the present invention, could be used as an auxiliary in islet cell transplantation to improve or promote islet cell function.

[0704] Infectious Disease

[0705] Polynucleotides or polypeptides, as well as agonists or antagonists of the present invention can be used to treat or detect infectious agents. For example, by increasing the immune response, particularly increasing the proliferation and differentiation of B and/or T cells, infectious diseases may be treated. The immune response may be increased by either enhancing an existing immune response, or by initiating a new immune response. Alternatively, polynucleotides or polypeptides, as well as agonists or antagonists of the present invention may also directly inhibit the infectious agent, without necessarily eliciting an immune response.

[0706] Viruses are one example of an infectious agent that can cause disease or symptoms that can be treated or detected by a polynucleotide or polypeptide and/or agonist or antagonist of the present invention. Examples of viruses, include, but are not limited to Examples of viruses, include, but are not limited to the following DNA and RNA viruses and viral families: Arbovirus, Adenoviridae, Arenaviridae, Arterivirus, Birnaviridae, Bunyaviridae, Caliciviridae, Circoviridae, Coronaviridae, Dengue, EBV, HIV, Flaviviridae, Hepadnaviridae (Hepatitis), Herpesviridae (such as, Cytomegalovirus, Herpes Simplex, Herpes Zoster), Mononegavirus (e.g., Paramyxoviridae, Morbillivirus, Rhabdoviridae), Orthomyxoviridae (e.g., Influenza A, Influenza B, and parainfluenza), Papiloma virus, Papovaviridae, Parvoviridae, Picornaviridae, Poxviridae (such as Smallpox or Vaccinia), Reoviridae (e.g., Rotavirus), Retroviridae (HTLV-I, HTLV-II, Lentivirus), and Togaviridae (e.g., Rubivirus). Viruses falling within these families can cause a variety of diseases or symptoms, including, but not limited to: arthritis, bronchiollitis, respiratory syncytial virus, encephalitis, eye infections (e.g., conjunctivitis, keratitis), chronic fatigue syndrome, hepatitis (A, B, C, E, Chronic Active, Delta), Japanese B encephalitis, Junin, Chikungunya, Rift Valley fever, yellow fever, meningitis, opportunistic infections (e.g., AIDS), pneumonia, Burkitt's Lymphoma, chickenpox, hemorrhagic fever, Measles, Mumps, Parainfluenza, Rabies, the common cold, Polio, leukemia, Rubella, sexually transmitted diseases, skin diseases (e.g., Kaposi's, warts), and viremia. polynucleotides or polypeptides, or agonists or antagonists of the invention, can be used to treat or detect any of these symptoms or diseases. In specific embodiments, polynucleotides, polypeptides, or agonists or antagonists of the invention are used to treat: meningitis, Dengue, EBV, and/or hepatitis (e.g., hepatitis B). In an additional specific embodiment polynucleotides, polypeptides, or agonists or antagonists of the invention are used to treat patients nonresponsive to one or more other commercially available hepatitis vaccines. In a further specific embodiment polynucleotides, polypeptides, or agonists or antagonists of the invention are used to treat AIDS.

[0707] Similarly, bacterial or fungal agents that can cause disease or symptoms and that can be treated or detected by a polynucleotide or polypeptide and/or agonist or antagonist of the present invention include, but are not limited to, the following Gram-Negative and Gram-positive bacteria, bacterial families, and fungi: Actinomyces (e.g., Norcardia), Acinetobacter, Cryptococcus neoformans, Aspergillus, Bacillaceae (e.g., Bacillus anthrasis), Bacteroides (e.g., Bacteroides fragilis), Blastomycosis, Bordetella, Borrelia (e.g., Borrelia burgdorferi), Brucella, Candidia, Campylobacter, Chlamydia, Clostridium (e.g., Clostridium botulinum, Clostridium dificile, Clostridium perfringens, Clostridium tetani), Coccidioides, Corynebacterium (e.g., Corynebacterium diptheriae), Cryptococcus, Dermatocycoses, E. coli (e.g., Enterotoxigenic E. coli and Enterohemorrhagic E. coli), Enterobacter (e.g. Enterobacter aerogenes), Enterobacteriaceae (Klebsiella, Salmonella (e.g., Salmonella typhi, Salmonella enteritidis, Salmonella paratyphi), Serratia, Yersinia, Shigella), Erysipelothrix, Haemophilus (e.g., Haemophilus influenza type B), Helicobacter, Legionella (e.g., Legionella pneumophila), Leptospira, Listeria (e.g., Listeria monocytogenes), Mycoplasma, Mycobacterium (e.g., Mycobacterium leprae and Mycobacterium tuberculosis), Vibrio (e.g., Vibrio cholerae), Neisseriaceae (e.g., Neisseria gonorrhea, Neisseria meningitidis), Pasteurellacea, Proteus, Pseudomonas (e.g., Psuedomonas aeruginosa), Rickettsiaceae, Spirochetes (e.g., Treponema spp., Leptospira spp., Borrelia spp.) Shigella spp., Staphylococcus (e.g., Staphylococcus aureus), Meningiococcus, Pneumococcus and Streptococcus (e.g., Streptococcus pneumoniae and Groups A, B, and C Streptococci), and Ureaplasmas. These bacterial, parasitic, and fungal families can cause diseases or symptoms, including, but not limited to: antibiotic-resistant infections, bacteremia, endocarditis, septicemia, eye infections (conjunctivitis) tuberculosis, uveitis, gingivitis, bacterial diarrhea, opportunistic infections (e.g., AIDS related infections), paronychia, prosthesis-related infections, dental caries, Reiter's Disease, respiratory tract infections (e.g., Whooping Cough or Empyema), sepsis, Lyme Disease, Cat-Scratch Disease, dysentery, paratyphoid fever, food poisoning, Legionella disease, chronic and acute inflammation, erythema, yeast infections, typhoid, pneumonia, gonorrhea, meningitis (e.g., meningitis types A and B), chlamydia, syphilis, diphtheria, leprosy, burcellosis, peptic ulcers, anthrax, spontaneous abortion, birth defects, lung infections, ear infections, deafness, blindness, lethargy, malaise, vomiting, chronic diarrhea, Crohn's disease, colitis, vaginosis, sterility, pelvic inflammatory disease, candidiasis, paratuberculosis, tuberculosis, lupus, botulism, gangrene, tetanus, impetigo, Rheumatic Fever, Scarlet Fever, sexually transmitted diseases, skin diseases (e.g., cellulitis, dermatocycoses), toxemia, urinary tract infections, wound infections or noscomial infections. Polynucleotides or polypeptides, agonists or antagonists of the invention, can be used to treat or detect any of these symptoms or diseases. In specific embodiments, polynucleotides, polypeptides, agonists or antagonists of the invention are used to treat: tetanus, diptheria, botulism, and/or meningitis type B.

[0708] Moreover, parasitic agents causing disease or symptoms that can be treated, prevented, and/or diagnosed by a polynucleotide or polypeptide and/or agonist or antagonist of the present invention include, but not limited to, the following families or class: Amebiasis, Babesiosis, Coccidiosis, Cryptosporidiosis, Dientamoebiasis, Dourine, Ectoparasitic, Giardias, Helminthiasis, Leishmaniasis, Schistisoma, Theileriasis, Toxoplasmosis, Trypanosomiasis, and Trichomonas and Sporozoans (e.g., Plasmodium virax, Plasmodium falciparium, Plasmodium malariae and Plasmodium ovale). These parasites can cause a variety of diseases or symptoms, including, but not limited to: Scabies, Trombiculiasis, eye infections, intestinal disease (e.g., dysentery, giardiasis), liver disease, lung disease, opportunistic infections (e.g., AIDS related), malaria, pregnancy complications, and toxoplasmosis. polynucleotides or polypeptides, or agonists or antagonists of the invention, can be used to treat, prevent, and/or diagnose any of these symptoms or diseases. In specific embodiments, polynucleotides, polypeptides, or agonists or antagonists of the invention are used to treat, prevent, and/or diagnose malaria.

[0709] Polynucleotides or polypeptides, as well as agonists or antagonists of the present invention of the present invention could either be by administering an effective amount of a polypeptide to the patient, or by removing cells from the patient, supplying the cells with a polynucleotide of the present invention, and returning the engineered cells to the patient (ex vivo therapy). Moreover, the polypeptide or polynucleotide of the present invention can be used as an antigen in a vaccine to raise an immune response against infectious disease.

[0710] Regeneration

[0711] Polynucleotides or polypeptides, as well as agonists or antagonists of the present invention can be used to differentiate, proliferate, and attract cells, leading to the regeneration of tissues. (See, Science 276:59-87 (1997).) The regeneration of tissues could be used to repair, replace, or protect tissue damaged by congenital defects, trauma (wounds, burns, incisions, or ulcers), age, disease (e.g. osteoporosis, osteocarthritis, periodontal disease, liver failure), surgery, including cosmetic plastic surgery, fibrosis, reperfusion injury, or systemic cytokine damage.

[0712] Tissues that could be regenerated using the present invention include organs (e.g., pancreas, liver, intestine, kidney, skin, endothelium), muscle (smooth, skeletal or cardiac), vasculature (including vascular and lymphatics), nervous, hematopoietic, and skeletal (bone, cartilage, tendon, and ligament) tissue. Preferably, regeneration occurs without or decreased scarring. Regeneration also may include angiogenesis.

[0713] Moreover, polynucleotides or polypeptides, as well as agonists or antagonists of the present invention, may increase regeneration of tissues difficult to heal. For example, increased tendon/ligament regeneration would quicken recovery time after damage. Polynucleotides or polypeptides, as well as agonists or antagonists of the present invention could also be used prophylactically in an effort to avoid damage. Specific diseases that could be treated include of tendinitis, carpal tunnel syndrome, and other tendon or ligament defects. A further example of tissue regeneration of non-healing wounds includes pressure ulcers, ulcers associated with vascular insufficiency, surgical, and traumatic wounds.

[0714] Similarly, nerve and brain tissue could also be regenerated by using polynucleotides or polypeptides, as well as agonists or antagonists of the present invention, to proliferate and differentiate nerve cells. Diseases that could be treated using this method include central and peripheral nervous system diseases, neuropathies, or mechanical and traumatic disorders (e.g., spinal cord disorders, head trauma, cerebrovascular disease, and stoke). Specifically, diseases associated with peripheral nerve injuries, peripheral neuropathy (e.g., resulting from chemotherapy or other medical therapies), localized neuropathies, and central nervous system diseases (e.g., Alzheimer's disease, Parkinson's disease, Huntington's disease, amyotrophic lateral sclerosis, and Shy-Drager syndrome), could all be treated using the polynucleotides or polypeptides, as well as agonists or antagonists of the present invention.

[0715] Chemotaxis

[0716] Polynucleotides or polypeptides, as well as agonists or antagonists of the present invention may have chemotaxis activity. A chemotaxic molecule attracts or mobilizes cells (e.g., monocytes, fibroblasts, neutrophils, T-cells, mast cells, eosinophils, epithelial and/or endothelial cells) to a particular site in the body, such as inflammation, infection, or site of hyperproliferation. The mobilized cells can then fight off and/or heal the particular trauma or abnormality.

[0717] Polynucleotides or polypeptides, as well as agonists or antagonists of the present invention may increase chemotaxic activity of particular cells. These chemotactic molecules can then be used to treat inflammation, infection, hyperproliferative disorders, or any immune system disorder by increasing the number of cells targeted to a particular location in the body. For example, chemotaxic molecules can be used to treat wounds and other trauma to tissues by attracting immune cells to the injured location. Chemotactic molecules of the present invention can also attract fibroblasts, which can be used to treat wounds.

[0718] It is also contemplated that polynucleotides or polypeptides, as well as agonists or antagonists of the present invention may inhibit chemotactic activity. These molecules could also be used to treat disorders. Thus, polynucleotides or polypeptides, as well as agonists or antagonists of the present invention could be used as an inhibitor of chemotaxis.

[0719] Binding Activity

[0720] A polypeptide of the present invention may be used to screen for molecules that bind to the polypeptide or for molecules to which the polypeptide binds. The binding of the polypeptide and the molecule may activate (agonist), increase, inhibit (antagonist), or decrease activity of the polypeptide or the molecule bound. Examples of such molecules include antibodies, oligonucleotides, proteins (e.g., receptors), or small molecules.

[0721] Preferably, the molecule is closely related to the natural ligand of the polypeptide, e.g., a fragment of the ligand, or a natural substrate, a ligand, a structural or functional mimetic. (See, Coligan et al., Current Protocols in Immunology 1(2):Chapter 5 (1991).) Similarly, the molecule can be closely related to the natural receptor to which the polypeptide binds, or at least, a fragment of the receptor capable of being bound by the polypeptide (e.g., active site). In either case, the molecule can be rationally designed using known techniques.

[0722] Preferably, the screening for these molecules involves producing appropriate cells which express the polypeptide. Preferred cells include cells from mammals, yeast, Drosophila, or E. coli. Cells expressing the polypeptide (or cell membrane containing the expressed polypeptide) are then preferably contacted with a test compound potentially containing the molecule to observe binding, stimulation, or inhibition of activity of either the polypeptide or the molecule.

[0723] The assay may simply test binding of a candidate compound to the polypeptide, wherein binding is detected by a label, or in an assay involving competition with a labeled competitor. Further, the assay may test whether the candidate compound results in a signal generated by binding to the polypeptide.

[0724] Alternatively, the assay can be carried out using cell-free preparations, polypeptide/molecule affixed to a solid support, chemical libraries, or natural product mixtures. The assay may also simply comprise the steps of mixing a candidate compound with a solution containing a polypeptide, measuring polypeptide/molecule activity or binding, and comparing the polypeptide/molecule activity or binding to a standard.

[0725] Preferably, an ELISA assay can measure polypeptide level or activity in a sample (e.g., biological sample) using a monoclonal or polyclonal antibody. The antibody can measure polypeptide level or activity by either binding, directly or indirectly, to the polypeptide or by competing with the polypeptide for a substrate.

[0726] Additionally, the receptor to which the polypeptide of the present invention binds can be identified by numerous methods known to those of skill in the art, for example, ligand panning and FACS sorting (Coligan, et al., Current Protocols in Immun., 1(2), Chapter 5, (1991)). For example, expression cloning is employed wherein polyadenylated RNA is prepared from a cell responsive to the polypeptides, for example, NIH3T3 cells which are known to contain multiple receptors for the FGF family proteins, and SC-3 cells, and a cDNA library created from this RNA is divided into pools and used to transfect COS cells or other cells that are not responsive to the polypeptides. Transfected cells which are grown on glass slides are exposed to the polypeptide of the present invention, after they have been labeled. The polypeptides can be labeled by a variety of means including iodination or inclusion of a recognition site for a site-specific protein kinase.

[0727] Following fixation and incubation, the slides are subjected to auto-radiographic analysis. Positive pools are identified and sub-pools are prepared and re-transfected using an iterative sub-pooling and re-screening process, eventually yielding a single clones that encodes the putative receptor.

[0728] As an alternative approach for receptor identification, the labeled polypeptides can be photoaffinity linked with cell membrane or extract preparations that express the receptor molecule. Cross-linked material is resolved by PAGE analysis and exposed to X-ray film. The labeled complex containing the receptors of the polypeptides can be excised, resolved into peptide fragments, and subjected to protein microsequencing. The amino acid sequence obtained from microsequencing would be used to design a set of degenerate oligonucleotide probes to screen a cDNA library to identify the genes encoding the putative receptors.

[0729] Moreover, the techniques of gene-shuffling, motif-shuffling, exon-shuffling, and/or codon-shuffling (collectively referred to as “DNA shuffling”) may be employed to modulate the activities of the polypeptide of the present invention thereby effectively generating agonists and antagonists of the polypeptide of the present invention. See generally, U.S. Pat. Nos. 5,605,793, 5,811,238, 5,830,721, 5,834,252, and 5,837,458, and Patten, P. A., et al., Curr. Opinion Biotechnol. 8:724-33 (1997); Harayama, S. Trends Biotechnol. 16(2):76-82 (1998); Hansson L. O., et al., J. Mol. Biol. 287:265-76 (1999); and Lorenzo, M. M. and Blasco, R. Biotechniques 24(2):308-13 (1998); each of these patents and publications are hereby incorporated by reference). In one embodiment, alteration of polynucleotides and corresponding polypeptides may be achieved by DNA shuffling. DNA shuffling involves the assembly of two or more DNA segments into a desired molecule by homologous, or site-specific, recombination. In another embodiment, polynucleotides and corresponding polypeptides may be altered by being subjected to random mutagenesis by error-prone PCR, random nucleotide insertion or other methods prior to recombination. In another embodiment, one or more components, motifs, sections, parts, domains, fragments, etc., of the polypeptide of the present invention may be recombined with one or more components, motifs, sections, parts, domains, fragments, etc. of one or more heterologous molecules. In preferred embodiments, the heterologous molecules are family members. In further preferred embodiments, the heterologous molecule is a growth factor such as, for example, platelet-derived growth factor (PDGF), insulin-like growth factor (IGF-I), transforming growth factor (TGF)-alpha, epidermal growth factor (EGF), fibroblast growth factor (FGF), TGF-beta, bone morphogenetic protein (BMP)-2, BMP-4, BMP-5, BMP-6, BMP-7, activins A and B, decapentaplegic(dpp), 60A, OP-2, dorsalin, growth differentiation factors (GDFs), nodal, MIS, inhibin-alpha, TGF-betal, TGF-beta2, TGF-beta3, TGF-beta5, and glial-derived neurotrophic factor (GDNF).

[0730] Other preferred fragments are biologically active fragments of the polypeptide of the present invention. Biologically active fragments are those exhibiting activity similar, but not necessarily identical, to an activity of the polypeptide of the present invention. The biological activity of the fragments may include an improved desired activity, or a decreased undesirable activity.

[0731] Additionally, this invention provides a method of screening compounds to identify those which modulate the action of the polypeptide of the present invention. An example of such an assay comprises combining a mammalian fibroblast cell, the polypeptide of the present invention, the compound to be screened and ³[H] thymidine under cell culture conditions where the fibroblast cell would normally proliferate. A control assay may be performed in the absence of the compound to be screened and compared to the amount of fibroblast proliferation in the presence of the compound to determine if the compound stimulates proliferation by determining the uptake of ³[H] thymidine in each case. The amount of fibroblast cell proliferation is measured by liquid scintillation chromatography which measures the incorporation of ³[H] thymidine. Both agonist and antagonist compounds may be identified by this procedure.

[0732] In another method, a mammalian cell or membrane preparation expressing a receptor for a polypeptide of the present invention is incubated with a labeled polypeptide of the present invention in the presence of the compound. The ability of the compound to enhance or block this interaction could then be measured. Alternatively, the response of a known second messenger system following interaction of a compound to be screened and the receptor is measured and the ability of the compound to bind to the receptor and elicit a second messenger response is measured to determine if the compound is a potential agonist or antagonist. Such second messenger systems include but are not limited to, cAMP guanylate cyclase, ion channels or phosphoinositide hydrolysis.

[0733] All of these above assays can be used as diagnostic or prognostic markers. The molecules discovered using these assays can be used to treat disease or to bring about a particular result in a patient (e.g., blood vessel growth) by activating or inhibiting the polypeptide/molecule. Moreover, the assays can discover agents which may inhibit or enhance the production of the polypeptides of the invention from suitably manipulated cells or tissues.

[0734] Therefore, the invention includes a method of identifying compounds which bind to a polypeptide of the invention comprising the steps of: (a) incubating a candidate binding compound with a polypeptide of the present invention; and (b) determining if binding has occurred. Moreover, the invention includes a method of identifying agonists/antagonists comprising the steps of: (a) incubating a candidate compound with a polypeptide of the present invention, (b) assaying a biological activity, and (b) determining if a biological activity of the polypeptide has been altered.

[0735] Targeted Delivery

[0736] In another embodiment, the invention provides a method of delivering compositions to targeted cells expressing a receptor for a polypeptide of the invention, or cells expressing a cell bound form of a polypeptide of the invention.

[0737] As discussed herein, polypeptides or antibodies of the invention may be associated with heterologous polypeptides, heterologous nucleic acids, toxins, or prodrugs via hydrophobic, hydrophilic, ionic and/or covalent interactions. In one embodiment, the invention provides a method for the specific delivery of compositions of the invention to cells by administering polypeptides of the invention (including antibodies) that are associated with heterologous polypeptides or nucleic acids. In one example, the invention provides a method for delivering a therapeutic protein into the targeted cell. In another example, the invention provides a method for delivering a single stranded nucleic acid (e.g., antisense or ribozymes) or double stranded nucleic acid (e.g., DNA that can integrate into the cell's genome or replicate episomally and that can be transcribed) into the targeted cell.

[0738] In another embodiment, the invention provides a method for the specific destruction of cells (e.g., the destruction of tumor cells) by administering polypeptides of the invention (e.g., polypeptides of the invention or antibodies of the invention) in association with toxins or cytotoxic prodrugs.

[0739] By “toxin” is meant compounds that bind and activate endogenous cytotoxic effector systems, radioisotopes, holotoxins, modified toxins, catalytic subunits of toxins, or any molecules or enzymes not normally present in or on the surface of a cell that under defined conditions cause the cell's death. Toxins that may be used according to the methods of the invention include, but are not limited to, radioisotopes known in the art, compounds such as, for example, antibodies (or complement fixing containing portions thereof) that bind an inherent or induced endogenous cytotoxic effector system, thymidine kinase, endonuclease, RNAse, alpha toxin, ricin, abrin, Pseudomonas exotoxin A, diphtheria toxin, saporin, momordin, gelonin, pokeweed antiviral protein, alpha-sarcin and cholera toxin. By “cytotoxic prodrug” is meant a non-toxic compound that is converted by an enzyme, normally present in the cell, into a cytotoxic compound. Cytotoxic prodrugs that may be used according to the methods of the invention include, but are not limited to, glutamyl derivatives of benzoic acid mustard alkylating agent, phosphate derivatives of etoposide or mitomycin C, cytosine arabinoside, daunorubisin, and phenoxyacetamide derivatives of doxorubicin.

[0740] Drug Screening

[0741] Further contemplated is the use of the polypeptides of the present invention, or the polynucleotides encoding these polypeptides, to screen for molecules which modify the activities of the polypeptides of the present invention. Such a method would include contacting the polypeptide of the present invention with a selected compound(s) suspected of having antagonist or agonist activity, and assaying the activity of these polypeptides following binding.

[0742] This invention is particularly useful for screening therapeutic compounds by using the polypeptides of the present invention, or binding fragments thereof, in any of a variety of drug screening techniques. The polypeptide or fragment employed in such a test may be affixed to a solid support, expressed on a cell surface, free in solution, or located intracellularly. One method of drug screening utilizes eukaryotic or prokaryotic host cells which are stably transformed with recombinant nucleic acids expressing the polypeptide or fragment. Drugs are screened against such transformed cells in competitive binding assays. One may measure, for example, the formulation of complexes between the agent being tested and a polypeptide of the present invention.

[0743] Thus, the present invention provides methods of screening for drugs or any other agents which affect activities mediated by the polypeptides of the present invention. These methods comprise contacting such an agent with a polypeptide of the present invention or a fragment thereof and assaying for the presence of a complex between the agent and the polypeptide or a fragment thereof, by methods well known in the art. In such a competitive binding assay, the agents to screen are typically labeled. Following incubation, free agent is separated from that present in bound form, and the amount of free or uncomplexed label is a measure of the ability of a particular agent to bind to the polypeptides of the present invention.

[0744] Another technique for drug screening provides high throughput screening for compounds having suitable binding affinity to the polypeptides of the present invention, and is described in great detail in European Patent Application 84/03564, published on Sep. 13, 1984, which is incorporated herein by reference herein. Briefly stated, large numbers of different small peptide test compounds are synthesized on a solid substrate, such as plastic pins or some other surface. The peptide test compounds are reacted with polypeptides of the present invention and washed. Bound polypeptides are then detected by methods well known in the art. Purified polypeptides are coated directly onto plates for use in the aforementioned drug screening techniques. In addition, non-neutralizing antibodies may be used to capture the peptide and immobilize it on the solid support.

[0745] This invention also contemplates the use of competitive drug screening assays in which neutralizing antibodies capable of binding polypeptides of the present invention specifically compete with a test compound for binding to the polypeptides or fragments thereof. In this manner, the antibodies are used to detect the presence of any peptide which shares one or more antigenic epitopes with a polypeptide of the invention.

[0746] Antisense And Ribozyme (Antagonists)

[0747] In specific embodiments, antagonists according to the present invention are nucleic acids corresponding to the sequences contained in SEQ ID NO:X, or the complementary strand thereof, and/or to nucleotide sequences contained in the cDNA contained in the related cDNA clone identified in Table 1. In one embodiment, antisense sequence is generated internally, by the organism, in another embodiment, the antisense sequence is separately administered (see, for example, O×Connor, J., Neurochem. 56:560 (1991). Oligodeoxynucleotides as Antisense Inhibitors of Gene Expression, CRC Press, Boca Raton, Fla. (1988). Antisense technology can be used to control gene expression through antisense DNA or RNA, or through triple-helix formation. Antisense techniques are discussed for example, in Okano, J., Neurochem. 56:560 (1991); Oligodeoxynucleotides as Antisense Inhibitors of Gene Expression, CRC Press, Boca Raton, Fla. (1988). Triple helix formation is discussed in, for instance, Lee et al., Nucleic Acids Research 6:3073 (1979); Cooney et al., Science 241:456 (1988); and Dervan et al., Science 251:1300 (1991). The methods are based on binding of a polynucleotide to a complementary DNA or RNA.

[0748] For example, the use of c-myc and c-myb antisense RNA constructs to inhibit the growth of the non-lymphocytic leukemia cell line HL-60 and other cell lines was previously described. (Wickstrom et al. (1988); Anfossi et al. (1989)). These experiments were performed in vitro by incubating cells with the oligoribonucleotide. A similar procedure for in vivo use is described in WO 91/15580. Briefly, a pair of oligonucleotides for a given antisense RNA is produced as follows: A sequence complimentary to the first 15 bases of the open reading frame is flanked by an EcoR1 site on the 5′ end and a HindIII site on the 3′ end. Next, the pair of oligonucleotides is heated at 90° C. for one minute and then annealed in 2× ligation buffer (20mM TRIS HCl pH 7.5, 10 mM MgCl2, 10 MM dithiothreitol (DTT) and 0.2 mM ATP) and then ligated to the EcoR1/HindIII site of the retroviral vector PMV7 (WO 91/15580).

[0749] For example, the 5′ coding portion of a polynucleotide that encodes the polypeptide of the present invention may be used to design an antisense RNA oligonucleotide of from about 10 to 40 base pairs in length. A DNA oligonucleotide is designed to be complementary to a region of the gene involved in transcription thereby preventing transcription and the production of the receptor. The antisense RNA oligonucleotide hybridizes to the mRNA in vivo and blocks translation of the mRNA molecule into receptor polypeptide.

[0750] In one embodiment, the antisense nucleic acid of the invention is produced intracellularly by transcription from an exogenous sequence. For example, a vector or a portion thereof, is transcribed, producing an antisense nucleic acid (RNA) of the invention. Such a vector would contain a sequence encoding the antisense nucleic acid. Such a vector can remain episomal or become chromosomally integrated, as long as it can be transcribed to produce the desired antisense RNA. Such vectors can be constructed by recombinant DNA technology methods standard in the art. Vectors can be plasmid, viral, or others known in the art, used for replication and expression in vertebrate cells. Expression of the sequence encoding the polypeptide of the present invention or fragments thereof, can be by any promoter known in the art to act in vertebrate, preferably human cells. Such promoters can be inducible or constitutive. Such promoters include, but are not limited to, the SV40 early promoter region (Bernoist and Chambon, Nature 29:304-310 (1981), the promoter contained in the 3′ long terminal repeat of Rous sarcoma virus (Yamamoto et al., Cell 22:787-797 (1980), the herpes thymidine promoter (Wagner et al., Proc. Natl. Acad. Sci. U.S.A. 78:1441-1445 (1981), the regulatory sequences of the metallothionein gene (Brinster, et al., Nature 296:39-42 (1982)), etc.

[0751] The antisense nucleic acids of the invention comprise a sequence complementary to at least a portion of an RNA transcript of a gene of the present invention. However, absolute complementarity, although preferred, is not required. A sequence “complementary to at least a portion of an RNA,” referred to herein, means a sequence having sufficient complementarity to be able to hybridize with the RNA, forming a stable duplex; in the case of double stranded antisense nucleic acids, a single strand of the duplex DNA may thus be tested, or triplex formation may be assayed. The ability to hybridize will depend on both the degree of complementarity and the length of the antisense nucleic acid. Generally, the larger the hybridizing nucleic acid, the more base mismatches with a RNA it may contain and still form a stable duplex (or triplex as the case may be). One skilled in the art can ascertain a tolerable degree of mismatch by use of standard procedures to determine the melting point of the hybridized complex.

[0752] Oligonucleotides that are complementary to the 5′ end of the message, e.g., the 5′ untranslated sequence up to and including the AUG initiation codon, should work most efficiently at inhibiting translation. However, sequences complementary to the 3′ untranslated sequences of mRNAs have been shown to be effective at inhibiting translation of mRNAs as well. See generally, Wagner, R., 1994, Nature 372:333-335. Thus, oligonucleotides complementary to either the 5′- or 3′- non-translated, non-coding regions of polynucleotide sequences described herein could be used in an antisense approach to inhibit translation of endogenous mRNA. Oligonucleotides complementary to the 5′ untranslated region of the mRNA should include the complement of the AUG start codon. Antisense oligonucleotides complementary to mRNA coding regions are less efficient inhibitors of translation but could be used in accordance with the invention. Whether designed to hybridize to the 5′-, 3′- or coding region of mRNA of the present invention, antisense nucleic acids should be at least six nucleotides in length, and are preferably oligonucleotides ranging from 6 to about 50 nucleotides in length. In specific aspects the oligonucleotide is at least 10 nucleotides, at least 17 nucleotides, at least 25 nucleotides or at least 50 nucleotides.

[0753] The polynucleotides of the invention can be DNA or RNA or chimeric mixtures or derivatives or modified versions thereof, single-stranded or double-stranded. The oligonucleotide can be modified at the base moiety, sugar moiety, or phosphate backbone, for example, to improve stability of the molecule, hybridization, etc. The oligonucleotide may include other appended groups such as peptides (e.g., for targeting host cell receptors in vivo), or agents facilitating transport across the cell membrane (see, e.g., Letsinger et al., 1989, Proc. Natl. Acad. Sci. U.S.A. 86:6553-6556; Lemaitre et al., 1987, Proc. Natl. Acad. Sci. 84:648-652; PCT Publication No. WO88/09810, published Dec. 15, 1988) or the blood-brain barrier (see, e.g., PCT Publication No. WO89/10134, published Apr. 25, 1988), hybridization-triggered cleavage agents. (See, e.g., Krol et al., 1988, BioTechniques 6:958-976) or intercalating agents. (See, e.g., Zon, 1988, Pharm. Res. 5:539-549). To this end, the oligonucleotide may be conjugated to another molecule, e.g., a peptide, hybridization triggered cross-linking agent, transport agent, hybridization-triggered cleavage agent, etc.

[0754] The antisense oligonucleotide may comprise at least one modified base moiety which is selected from the group including, but not limited to, 5-fluorouracil, 5-bromouracil, 5-chlorouracil, 5-iodouracil, hypoxanthine, xantine, 4-acetylcytosine, 5-(carboxyhydroxylmethyl) uracil, 5-carboxymethylaminomethyl-2-thiouridine, 5-carboxymethylaminomethyluracil, dihydrouracil, beta-D-galactosylqueosine, inosine, N6-isopentenyladenine, 1-methylguanine, 1-methylinosine, 2,2-dimethylguanine, 2-methyladenine, 2-methylguanine, 3-methylcytosine, 5-methylcytosine, N6-adenine, 7-methylguanine, 5-methylaminomethyluracil, 5-methoxyaminomethyl-2-thiouracil, beta-D-mannosylqueosine, 5′-methoxycarboxymethyluracil, 5-methoxyuracil, 2-methylthio-N6-isopentenyladenine, uracil-5-oxyacetic acid (v), wybutoxosine, pseudouracil, queosine, 2-thiocytosine, 5-methyl-2-thiouracil, 2-thiouracil, 4-thiouracil, 5-methyluracil, uracil-5-oxyacetic acid methylester, uracil-5-oxyacetic acid (v), 5-methyl-2-thiouracil, 3-(3-amino-3-N-2-carboxypropyl) uracil, (acp3)w, and 2,6-diaminopurine.

[0755] The antisense oligonucleotide may also comprise at least one modified sugar moiety selected from the group including, but not limited to, arabinose, 2-fluoroarabinose, xylulose, and hexose.

[0756] In yet another embodiment, the antisense oligonucleotide comprises at least one modified phosphate backbone selected from the group including, but not limited to, a phosphorothioate, a phosphorodithioate, a phosphoramidothioate, a phosphoramidate, a phosphordiamidate, a methylphosphonate, an alkyl phosphotriester, and a formacetal or analog thereof.

[0757] In yet another embodiment, the antisense oligonucleotide is an a-anomeric oligonucleotide. An a-anomeric oligonucleotide forms specific double-stranded hybrids with complementary RNA in which, contrary to the usual b-units, the strands run parallel to each other (Gautier et al., 1987, Nucl. Acids Res. 15:6625-6641). The oligonucleotide is a 2′-0-methylribonucleotide (Inoue et al., 1987, Nucl. Acids Res. 15:6131-6148), or a chimeric RNA-DNA analogue (Inoue et al., 1987, FEBS Lett. 215:327-330).

[0758] Polynucleotides of the invention may be synthesized by standard methods known in the art, e.g. by use of an automated DNA synthesizer (such as are commercially available from Biosearch, Applied Biosystems, etc.). As examples, phosphorothioate oligonucleotides may be synthesized by the method of Stein et al. (1988, Nucl. Acids Res. 16:3209), methylphosphonate oligonucleotides can be prepared by use of controlled pore glass polymer supports (Sarin et al., 1988, Proc. Natl. Acad. Sci. U.S.A. 85:7448-7451), etc.

[0759] While antisense nucleotides complementary to the coding region sequence could be used, those complementary to the transcribed untranslated region are most preferred.

[0760] Potential antagonists according to the invention also include catalytic RNA, or a ribozyme (See, e.g., PCT International Publication WO 90/11364, published October 4, 1990; Sarver et al, Science 247:1222-1225 (1990). While ribozymes that cleave mRNA at site specific recognition sequences can be used to destroy mRNAs, the use of hammerhead ribozymes is preferred. Hammerhead ribozymes cleave mRNAs at locations dictated by flanking regions that form complementary base pairs with the target mRNA. The sole requirement is that the target mRNA have the following sequence of two bases: 5′-UG-3′. The construction and production of hammerhead ribozymes is well known in the art and is described more fully in Haseloff and Gerlach, Nature 334:585-591 (1988). There are numerous potential hammerhead ribozyme cleavage sites within the nucleotide sequence of SEQ ID NO:X. Preferably, the ribozyme is engineered so that the cleavage recognition site is located near the 5′ end of the mRNA; i.e., to increase efficiency and minimize the intracellular accumulation of non-functional mRNA transcripts.

[0761] As in the antisense approach, the ribozymes of the invention can be composed of modified oligonucleotides (e.g. for improved stability, targeting, etc.) and should be delivered to cells which express in vivo. DNA constructs encoding the ribozyme may be introduced into the cell in the same manner as described above for the introduction of antisense encoding DNA. A preferred method of delivery involves using a DNA construct “encoding” the ribozyme under the control of a strong constitutive promoter, such as, for example, pol III or pol II promoter, so that transfected cells will produce sufficient quantities of the ribozyme to destroy endogenous messages and inhibit translation. Since ribozymes unlike antisense molecules, are catalytic, a lower intracellular concentration is required for efficiency.

[0762] Antagonist/agonist compounds may be employed to inhibit the cell growth and proliferation effects of the polypeptides of the present invention on neoplastic cells and tissues, i.e. stimulation of angiogenesis of tumors, and, therefore, retard or prevent abnormal cellular growth and proliferation, for example, in tumor formation or growth.

[0763] The antagonist/agonist may also be employed to prevent hyper-vascular diseases, and prevent the proliferation of epithelial lens cells after extracapsular cataract surgery. Prevention of the mitogenic activity of the polypeptides of the present invention may also be desirous in cases such as restenosis after balloon angioplasty.

[0764] The antagonist/agonist may also be employed to prevent the growth of scar tissue during wound healing.

[0765] The antagonist/agonist may also be employed to treat the diseases described herein.

[0766] Thus, the invention provides a method of treating disorders or diseases, including but not limited to the disorders or diseases listed throughout this application, associated with overexpression of a polynucleotide of the present invention by administering to a patient (a) an antisense molecule directed to the polynucleotide of the present invention, and/or (b) a ribozyme directed to the polynucleotide of the present invention.

[0767] Binding Peptides and Other Molecules

[0768] The invention also encompasses screening methods for identifying polypeptides and nonpolypeptides that bind ovarian and/or breast antigen polypeptides, and the ovarian and/or breast antigen binding molecules identified thereby. These binding molecules are useful, for example, as agonists and antagonists of the ovarian and/or breast antigen polypeptides. Such agonists and antagonists can be used, in accordance with the invention, in the therapeutic embodiments described in detail, below.

[0769] This method comprises the steps of:

[0770] contacting ovarian and/or breast antigen polypeptides or ovarian and/or breast antigen-like polypeptides with a plurality of molecules; and

[0771] identifying a molecule that binds the ovarian and/or breast antigen polypeptides or ovarian and/or breast antigen-like polypeptides.

[0772] The step of contacting the ovarian and/or breast antigen polypeptides or ovarian and/or breast antigen-like polypeptides with the plurality of molecules may be effected in a number of ways. For example, one may contemplate immobilizing the ovarian and/or breast antigen polypeptides or ovarian and/or breast antigen-like polypeptides on a solid support and bringing a solution of the plurality of molecules in contact with the immobilized ovarian and/or breast antigen polypeptides or ovarian and/or breast antigen-like polypeptides. Such a procedure would be akin to an affinity chromatographic process, with the affinity matrix being comprised of the immobilized ovarian and/or breast antigen polypeptides or ovarian and/or breast antigen-like polypeptides. The molecules having a selective affinity for the ovarian and/or breast antigen polypeptides or ovarian and/or breast antigen-like polypeptides can then be purified by affinity selection. The nature of the solid support, process for attachment of the ovarian and/or breast antigen polypeptides or ovarian and/or breast antigen-like polypeptides to the solid support, solvent, and conditions of the affinity isolation or selection are largely conventional and well known to those of ordinary skill in the art.

[0773] Alternatively, one may also separate a plurality of polypeptides into substantially separate fractions comprising a subset of or individual polypeptides. For instance, one can separate the plurality of polypeptides by gel electrophoresis, column chromatography, or like method known to those of ordinary skill for the separation of polypeptides. The individual polypeptides can also be produced by a transformed host cell in such a way as to be expressed on or about its outer surface (e.g., a recombinant phage). Individual isolates can then be “probed” by the ovarian and/or breast antigen polypeptides or ovarian and/or breast antigen-like polypeptides, optionally in the presence of an inducer should one be required for expression, to determine if any selective affinity interaction takes place between the ovarian and/or breast antigen polypeptides or ovarian and/or breast antigen-like polypeptides and the individual clone. Prior to contacting the ovarian and/or breast antigen polypeptides or ovarian and/or breast antigen-like polypeptides with each fraction comprising individual polypeptides, the polypeptides could first be transferred to a solid support for additional convenience. Such a solid support may simply be a piece of filter membrane, such as one made of nitrocellulose or nylon. In this manner, positive clones could be identified from a collection of transformed host cells of an expression library, which harbor a DNA construct encoding a polypeptide having a selective affinity for ovarian and/or breast antigen polypeptides or ovarian and/or breast antigen-like polypeptides. Furthermore, the amino acid sequence of the polypeptide having a selective affinity for the ovarian and/or breast antigen polypeptides or ovarian and/or breast antigen-like polypeptides can be determined directly by conventional means or the coding sequence of the DNA encoding the polypeptide can frequently be determined more conveniently. The primary sequence can then be deduced from the corresponding DNA sequence. If the amino acid sequence is to be determined from the polypeptide itself, one may use microsequencing techniques. The sequencing technique may include mass spectroscopy.

[0774] In certain situations, it may be desirable to wash away any unbound ovarian and/or breast antigen polypeptides or ovarian and/or breast antigen-like polypeptides, or alternatively, unbound polypeptides, from a mixture of the ovarian and/or breast antigen polypeptides or ovarian and/or breast antigen-like polypeptides and the plurality of polypeptides prior to attempting to determine or to detect the presence of a selective affinity interaction. Such a wash step may be particularly desirable when the ovarian and/or breast antigen polypeptides or ovarian and/or breast antigen-like polypeptides or the plurality of polypeptides is bound to a solid support.

[0775] The plurality of molecules provided according to this method may be provided by way of diversity libraries, such as random or combinatorial peptide or nonpeptide libraries which can be screened for molecules that specifically bind ovarian and/or breast antigen polypeptides. Many libraries are known in the art that can be used, e.g., chemically synthesized libraries, recombinant (e.g., phage display libraries), and in vitro translation-based libraries. Examples of chemically synthesized libraries are described in Fodor et al., 1991, Science 251:767-773; Houghten et al., 1991, Nature 354:84-86; Lam et al., 1991, Nature 354:82-84; Medynski, 1994, Bio/Technology 12:709-710;Gallop et al., 1994, J. Medicinal Chemistry 37(9):1233-1251; Ohlmeyer et al., 1993, Proc. Natl. Acad. Sci. USA 90:10922-10926; Erb et al., 1994, Proc. Natl. Acad. Sci. USA 91:11422-11426; Houghten et al., 1992, Biotechniques 13:412; Jayawickreme et al., 1994, Proc. Natl. Acad. Sci. USA 91:1614-1618; Salmon et al., 1993, Proc. Natl. Acad. Sci. USA 90:11708-11712; PCT Publication No. WO 93/20242; and Brenner and Lerner, 1992, Proc. Natl. Acad. Sci. USA 89:5381-5383.

[0776] Examples of phage display libraries are described in Scott and Smith, 1990, Science 249:386-390; Devlin et al., 1990, Science, 249:404-406; Christian, R. B., et al., 1992, J. Mol. Biol. 227:711-718); Lenstra, 1992, J. Immunol. Meth. 152:149-157; Kay et al., 1993, Gene 128:59-65; and PCT Publication No. WO 94/18318 dated Aug. 18, 1994.

[0777] In vitro translation-based libraries include but are not limited to those described in PCT Publication No. WO 91/05058 dated Apr. 18, 1991; and Mattheakis et al., 1994, Proc. Natl. Acad. Sci. USA 91:9022-9026.

[0778] By way of examples of nonpeptide libraries, a benzodiazepine library (see e.g., Bunin et al., 1994, Proc. Natl. Acad. Sci. USA 91:4708-4712) can be adapted for use. Peptoid libraries (Simon et al., 1992, Proc. Natl. Acad. Sci. USA 89:9367-9371) can also be used. Another example of a library that can be used, in which the amide functionalities in peptides have been permethylated to generate a chemically transformed combinatorial library, is described by Ostresh et al. (1994, Proc. Natl. Acad. Sci. USA 91:11138-11142).

[0779] The variety of non-peptide libraries that are useful in the present invention is great. For example, Ecker and Crooke, 1995, Bio/Technology 13:351-360 list benzodiazepines, hydantoins, piperazinediones, biphenyls, sugar analogs, beta-mercaptoketones, arylacetic acids, acylpiperidines, benzopyrans, cubanes, xanthines, aminimides, and oxazolones as among the chemical species that form the basis of various libraries.

[0780] Non-peptide libraries can be classified broadly into two types: decorated monomers and oligomers. Decorated monomer libraries employ a relatively simple scaffold structure upon which a variety functional groups is added. Often the scaffold will be a molecule with a known useful pharmacological activity. For example, the scaffold might be the benzodiazepine structure.

[0781] Non-peptide oligomer libraries utilize a large number of monomers that are assembled together in ways that create new shapes that depend on the order of the monomers. Among the monomer units that have been used are carbamates, pyrrolinones, and morpholinos. Peptoids, peptide-like oligomers in which the side chain is attached to the alpha amino group rather than the alpha carbon, form the basis of another version of non-peptide oligomer libraries. The first non-peptide oligomer libraries utilized a single type of monomer and thus contained a repeating backbone. Recent libraries have utilized more than one monomer, giving the libraries added flexibility.

[0782] Screening the libraries can be accomplished by any of a variety of commonly known methods. See, e.g., the following references, which disclose screening of peptide libraries: Parmley and Smith, 1989, Adv. Exp. Med. Biol. 251:215-218; Scott and Smith, 1990, Science 249:386-390; Fowlkes et al., 1992; BioTechniques 13:422-427; Oldenburg et al., 1992, Proc. Natl. Acad. Sci. USA 89:5393-5397; Yu et al., 1994, Cell 76:933-945; Staudt et al., 1988, Science 241:577-580; Bock et al., 1992, Nature 355:564-566; Tuerk et al., 1992, Proc. Natl. Acad. Sci. USA 89:6988-6992; Ellington et al., 1992, Nature 355:850-852; U.S. Pat. No. 5,096,815, U.S. Pat. No. 5,223,409, and U.S. Pat. No. 5,198,346, all to Ladner et al.; Rebar and Pabo, 1993, Science 263:671-673; and CT Publication No. WO 94/18318.

[0783] In a specific embodiment, screening to identify a molecule that binds ovarian and/or breast antigen polypeptides can be carried out by contacting the library members with an ovarian and/or breast antigen polypeptides or ovarian and/or breast antigen-like polypeptides immobilized on a solid phase and harvesting those library members that bind to the ovarian and/or breast antigen polypeptides or ovarian and/or breast antigen-like polypeptides. Examples of such screening methods, termed “panning” techniques are described by way of example in Parmley and Smith, 1988, Gene 73:305-318; Fowlkes et al., 1992, BioTechniques 13:422-427; International Publication No. WO 94/18318; and in references cited herein.

[0784] In another embodiment, the two-hybrid system for selecting interacting proteins in yeast (Fields and Song, 1989, Nature 340:245-246; Chien et al., 1991, Proc. Natl. Acad. Sci. USA 88:9578-9582) can be used to identify molecules that specifically bind to ovarian and/or breast antigen polypeptides or ovarian and/or breast antigen-like polypeptides.

[0785] Where the ovarian and/or breast antigen binding molecule is a polypeptide, the polypeptide can be conveniently selected from any peptide library, including random peptide libraries, combinatorial peptide libraries, or biased peptide libraries. The term “biased” is used herein to mean that the method of generating the library is manipulated so as to restrict one or more parameters that govern the diversity of the resulting collection of molecules, in this case peptides.

[0786] Thus, a truly random peptide library would generate a collection of peptides in which the probability of finding a particular amino acid at a given position of the peptide is the same for all 20 amino acids. A bias can be introduced into the library, however, by specifying, for example, that a lysine occur every fifth amino acid or that positions 4, 8, and 9 of a decapeptide library be fixed to include only arginine. Clearly, many types of biases can be contemplated, and the present invention is not restricted to any particular bias. Furthermore, the present invention contemplates specific types of peptide libraries, such as phage displayed peptide libraries and those that utilize a DNA construct comprising a lambda phage vector with a DNA insert.

[0787] As mentioned above, in the case of an ovarian and/or breast antigen binding molecule that is a polypeptide, the polypeptide may have about 6 to less than about 60 amino acid residues, preferably about 6 to about 10 amino acid residues, and most preferably, about 6 to about 22 amino acids. In another embodiment, an ovarian and/or breast antigen binding polypeptide has in the range of 15-100 amino acids, or 20-50 amino acids.

[0788] The selected ovarian and/or breast antigen binding polypeptide can be obtained by chemical synthesis or recombinant expression. Other Activities

[0789] A polypeptide, polynucleotide, agonist, or antagonist of the present invention, as a result of the ability to stimulate vascular endothelial cell growth, may be employed in treatment for stimulating re-vascularization of ischemic tissues due to various disease conditions such as thrombosis, arteriosclerosis, and other cardiovascular conditions. The polypeptide, polynucleotide, agonist, or antagonist of the present invention may also be employed to stimulate angiogenesis and limb regeneration, as discussed above.

[0790] A polypeptide, polynucleotide, agonist, or antagonist of the present invention may also be employed for treating wounds due to injuries, burns, post-operative tissue repair, and ulcers since they are mitogenic to various cells of different origins, such as fibroblast cells and skeletal muscle cells, and therefore, facilitate the repair or replacement of damaged or diseased tissue.

[0791] A polypeptide, polynucleotide, agonist, or antagonist of the present invention may also be employed stimulate neuronal growth and to treat and prevent neuronal damage which occurs in certain neuronal disorders or neuro-degenerative conditions such as Alzheimer's disease, Parkinson's disease, and AIDS-related complex. A polypeptide, polynucleotide, agonist, or antagonist of the present invention may have the ability to stimulate chondrocyte growth, therefore, they may be employed to enhance bone and periodontal regeneration and aid in tissue transplants or bone grafts.

[0792] A polypeptide, polynucleotide, agonist, or antagonist of the present invention may be also be employed to prevent skin aging due to sunburn by stimulating keratinocyte growth.

[0793] A polypeptide, polynucleotide, agonist, or antagonist of the present invention may also be employed for preventing hair loss, since FGF family members activate hair-forming cells and promotes melanocyte growth. Along the same lines, a polypeptide, polynucleotide, agonist, or antagonist of the present invention may be employed to stimulate growth and differentiation of hematopoietic cells and bone marrow cells when used in combination with other cytokines.

[0794] A polypeptide, polynucleotide, agonist, or antagonist of the present invention may also be employed to maintain organs before transplantation or for supporting cell culture of primary tissues. A polypeptide, polynucleotide, agonist, or antagonist of the present invention may also be employed for inducing tissue of mesodermal origin to differentiate in early embryos.

[0795] A polypeptide, polynucleotide, agonist, or antagonist of the present invention may also increase or decrease the differentiation or proliferation of embryonic stem cells, besides, as discussed above, hematopoietic lineage.

[0796] A polypeptide, polynucleotide, agonist, or antagonist of the present invention may also be used to modulate mammalian characteristics, such as body height, weight, hair color, eye color, skin, percentage of adipose tissue, pigmentation, size, and shape (e.g., cosmetic surgery). Similarly, a polypeptide, polynucleotide, agonist, or antagonist of the present invention may be used to modulate mammalian metabolism affecting catabolism, anabolism, processing, utilization, and storage of energy.

[0797] A polypeptide, polynucleotide, agonist, or antagonist of the present invention may be used to change a mammal's mental state or physical state by influencing biorhythms, caricadic rhythms, depression (including depressive disorders), tendency for violence, tolerance for pain, reproductive capabilities (preferably by Activin or Inhibin-like activity), hormonal or endocrine levels, appetite, libido, memory, stress, or other cognitive qualities.

[0798] A polypeptide, polynucleotide, agonist, or antagonist of the present invention may also be used as a food additive or preservative, such as to increase or decrease storage capabilities, fat content, lipid, protein, carbohydrate, vitamins, minerals, cofactors or other nutritional components.

[0799] The above-recited applications have uses in a wide variety of hosts. Such hosts include, but are not limited to, human, murine, rabbit, goat, guinea pig, camel, horse, mouse, rat, hamster, pig, micro-pig, chicken, goat, cow, sheep, dog, cat, non-human primate, and human. In specific embodiments, the host is a mouse, rabbit, goat, guinea pig, chicken, rat, hamster, pig, sheep, dog or cat. In preferred embodiments, the host is a mammal. In most preferred embodiments, the host is a human.

[0800] Other Preferred Embodiments

[0801] Other preferred embodiments of the claimed invention include an isolated nucleic acid molecule comprising a nucleotide sequence which is at least 95% identical to a sequence of at least about 50 contiguous nucleotides in the nucleotide sequence of SEQ ID NO:X or the complementary strand thereto, and/or the cDNA in the related cDNA clone contained in the deposit.

[0802] Also preferred is a nucleic acid molecule wherein said sequence of contiguous nucleotides is included in the nucleotide sequence of SEQ ID NO:X in the range of positions identified as “Start” and “End” in columns 7 and 8 as defined for SEQ ID NO:X in Table 1.

[0803] Also preferred is an isolated nucleic acid molecule comprising a nucleotide sequence which is at least 95% identical to a sequence of at least about 150 contiguous nucleotides in the nucleotide sequence of SEQ ID NO:X or the complementary strand thereto, and/or the cDNA in the related cDNA clone contained in the deposit.

[0804] Further preferred is an isolated nucleic acid molecule comprising a nucleotide sequence which is at least 95% identical to a sequence of at least about 500 contiguous nucleotides in the nucleotide sequence of SEQ ID NO:X or the complementary strand thereto, and/or the cDNA in the related cDNA clone contained in the deposit.

[0805] A further preferred embodiment is a nucleic acid molecule comprising a nucleotide sequence which is at least 95% identical to the nucleotide sequence of SEQ ID NO:X in the range of positions identified as “Start” and “End” in columns 7 and 8 as defined for SEQ ID NO:X in Table 1.

[0806] A further preferred embodiment is an isolated nucleic acid molecule comprising a nucleotide sequence which is at least 95% identical to the complete nucleotide sequence of SEQ ID NO:X or the complementary strand thereto, and/or the cDNA in the related cDNA clone contained in the deposit.

[0807] Also preferred is an isolated nucleic acid molecule which hybridizes under stringent hybridization conditions to a nucleic acid molecule comprising a nucleotide sequence of SEQ ID NO:X or the complementary strand thereto, and/or the cDNA in the related cDNA clone contained in the deposit, wherein said nucleic acid molecule which hybridizes does not hybridize under stringent hybridization conditions to a nucleic acid molecule having a nucleotide sequence consisting of only A residues or of only T residues.

[0808] Also preferred is a composition of matter comprising a DNA molecule which comprises a cDNA clone contained in the deposit.

[0809] Also preferred is an isolated nucleic acid molecule comprising a nucleotide sequence which is at least 95% identical to a sequence of at least 50 contiguous nucleotides in the nucleotide sequence of the cDNA in the related cDNA clone contained in the deposit.

[0810] Also preferred is an isolated nucleic acid molecule, wherein said sequence of at least 50 contiguous nucleotides is included in the nucleotide sequence of an open reading frame sequence encoded by the cDNA in the related cDNA clone contained in the deposit.

[0811] Also preferred is an isolated nucleic acid molecule comprising a nucleotide sequence which is at least 95% identical to sequence of at least 150 contiguous nucleotides in the nucleotide sequence encoded by the cDNA in the related cDNA clone contained in the deposit.

[0812] A further preferred embodiment is an isolated nucleic acid molecule comprising a nucleotide sequence which is at least 95% identical to sequence of at least 500 contiguous nucleotides in the nucleotide sequence encoded by the cDNA in the related cDNA clone contained in the deposit.

[0813] A further preferred embodiment is an isolated nucleic acid molecule comprising a nucleotide sequence which is at least 95% identical to the complete nucleotide sequence encoded by the cDNA in the related cDNA clone contained in the deposit.

[0814] A further preferred embodiment is a method for detecting in a biological sample a nucleic acid molecule comprising a nucleotide sequence which is at least 95% identical to a sequence of at least 50 contiguous nucleotides in a sequence selected from the group consisting of: a nucleotide sequence of SEQ ID NO:X or the complementary strand thereto; and a nucleotide sequence encoded by the cDNA in the related cDNA clone contained in the deposit; which method comprises a step of comparing a nucleotide sequence of at least one nucleic acid molecule in said sample with a sequence selected from said group and determining whether the sequence of said nucleic acid molecule in said sample is at least 95% identical to said selected sequence.

[0815] Also preferred is the above method wherein said step of comparing sequences comprises determining the extent of nucleic acid hybridization between nucleic acid molecules in said sample and a nucleic acid molecule comprising said sequence selected from said group. Similarly, also preferred is the above method wherein said step of comparing sequences is performed by comparing the nucleotide sequence determined from a nucleic acid molecule in said sample with said sequence selected from said group. The nucleic acid molecules can comprise DNA molecules or RNA molecules.

[0816] A further preferred embodiment is a method for identifying the species, tissue or cell type of a biological sample which method comprises a step of detecting nucleic acid molecules in said sample, if any, comprising a nucleotide sequence that is at least 95% identical to a sequence of at least 50 contiguous nucleotides in a sequence selected from the group consisting of: a nucleotide sequence of SEQ ID NO:X or the complementary strand thereto; and a nucleotide sequence encoded by the cDNA in the related cDNA clone contained in the deposit.

[0817] Also preferred is the above method for identifying the species, tissue or cell type of a biological sample which comprises a step of detecting nucleic acid molecules comprising a nucleotide sequence in a panel of at least two nucleotide sequences, wherein at least one sequence in said panel is at least 95% identical to a sequence of at least 50 contiguous nucleotides in a sequence selected from said group.

[0818] Also preferred is a method for diagnosing in a subject a pathological condition associated with abnormal structure or expression of a nucleotide sequence of SEQ ID NO:X; or the cDNA in the related cDNA clone identified in Table 1 which encodes a protein, wherein the method comprises a step of detecting in a biological sample obtained from said subject nucleic acid molecules, if any, comprising a nucleotide sequence that is at least 95% identical to a sequence of at least 50 contiguous nucleotides in a sequence selected from the group consisting of: a nucleotide sequence of SEQ ID NO:X or the complementary strand thereto; and a nucleotide sequence of the cDNA in the related cDNA clone contained in the deposit.

[0819] Also preferred is the above method for diagnosing a pathological condition which comprises a step of detecting nucleic acid molecules comprising a nucleotide sequence in a panel of at least two nucleotide sequences, wherein at least one sequence in said panel is at least 95% identical to a sequence of at least 50 contiguous nucleotides in a sequence selected from said group.

[0820] Also preferred is a composition of matter comprising isolated nucleic acid molecules wherein the nucleotide sequences of said nucleic acid molecules comprise a panel of at least two nucleotide sequences, wherein at least one sequence in said panel is at least 95% identical to a sequence of at least 50 contiguous nucleotides in a sequence selected from the group consisting of: a nucleotide sequence of SEQ ID NO:X or the complementary strand thereto; and a nucleotide sequence encoded by the cDNA in the related cDNA clone contained in the deposit. The nucleic acid molecules can comprise DNA molecules or RNA molecules.

[0821] Also preferred is a composition of matter comprising isolated nucleic acid molecules wherein the nucleotide sequences of said nucleic acid molecules comprise a DNA microarray or “chip” of at least 1, 2, 3, 4, 5, 6, 7, 8, 9, 10, 15, 20, 25, 30, 40, 50, 100, 150, 200, 250, 300, 500, 1000, 2000, 3000 or 4000 nucleotide sequences, wherein at least one sequence in said DNA microarray or “chip” is at least 95% identical to a sequence of at least 50 contiguous nucleotides in a sequence selected from the group consisting of: a nucleotide sequence of SEQ ID NO:X or the complementary strand thereto; and a nucleotide sequence encoded by the cDNA in the cDNA clone referenced in Table 1. The nucleic acid molecules can comprise DNA molecules or RNA molecules.

[0822] Also preferred is an isolated polypeptide comprising an amino acid sequence at least 90% identical to a sequence of at least about 10 contiguous amino acids in the polypeptide sequence of SEQ ID NO:Y; a polypeptide encoded by SEQ ID NO:X; and/or a polypeptide encoded by the cDNA in the related cDNA clone contained in the deposit.

[0823] Also preferred is an isolated polypeptide comprising an amino acid sequence at least 95% identical to a sequence of at least about 30 contiguous amino acids in the amino acid sequence of SEQ ID NO:Y; a polypeptide encoded by SEQ ID NO:X; and/or a polypeptide encoded by the cDNA in the related cDNA clone contained in the deposit.

[0824] Further preferred is an isolated polypeptide comprising an amino acid sequence at least 95% identical to a sequence of at least about 100 contiguous amino acids in the amino acid sequence of SEQ ID NO:Y; a polypeptide encoded by SEQ ID NO:X; and/or a polypeptide encoded by the cDNA in the related cDNA clone contained in the deposit.

[0825] Further preferred is an isolated polypeptide comprising an amino acid sequence at least 95% identical to the complete amino acid sequence of SEQ ID NO:Y; a polypeptide encoded by SEQ ID NO:X; and/or a polypeptide encoded by the cDNA in the related cDNA clone contained in the deposit.

[0826] Further preferred is an isolated polypeptide comprising an amino acid sequence at least 90% identical to a sequence of at least about 10 contiguous amino acids in the complete amino acid sequence of a polypeptide encoded by the cDNA clone referenced in Table 1.

[0827] Also preferred is a polypeptide wherein said sequence of contiguous amino acids is included in the amino acid sequence of a portion of said polypeptide encoded by the cDNA clone referenced in Table 1; a polypeptide encoded by SEQ ID NO:X; and/or the polypeptide sequence of SEQ ID NO:Y.

[0828] Also preferred is an isolated polypeptide comprising an amino acid sequence at least 95% identical to a sequence of at least about 30 contiguous amino acids in the amino acid sequence of a polypeptide encoded by the cDNA clone referenced in Table 1.

[0829] Also preferred is an isolated polypeptide comprising an amino acid sequence at least 95% identical to a sequence of at least about 100 contiguous amino acids in the amino acid sequence of a polypeptide encoded by the cDNA clone referenced in Table 1.

[0830] Also preferred is an isolated polypeptide comprising an amino acid sequence at least 95% identical to the amino acid sequence of a polypeptide encoded by the cDNA clone referenced in Table 1.

[0831] Further preferred is an isolated antibody which binds specifically to a polypeptide comprising an amino acid sequence that is at least 90% identical to a sequence of at least 10 contiguous amino acids in a sequence selected from the group consisting of: a polypeptide sequence of SEQ ID NO:Y; a polypeptide encoded by SEQ ID NO:X; and a polypeptide encoded by the cDNA in the related cDNA clone contained in the deposit.

[0832] Further preferred is a method for detecting in a biological sample a polypeptide comprising an amino acid sequence which is at least 90% identical to a sequence of at least 10 contiguous amino acids in a sequence selected from the group consisting of: a polypeptide sequence of SEQ ID NO:Y; a polypeptide encoded by SEQ ID NO:X; and a polypeptide encoded by the cDNA in the related cDNA clone referenced in Table 1; which method comprises a step of comparing an amino acid sequence of at least one polypeptide molecule in said sample with a sequence selected from said group and determining whether the sequence of said polypeptide molecule in said sample is at least 90% identical to said sequence of at least 10 contiguous amino acids.

[0833] Also preferred is the above method wherein said step of comparing an amino acid sequence of at least one polypeptide molecule in said sample with a sequence selected from said group comprises determining the extent of specific binding of polypeptides in said sample to an antibody which binds specifically to a polypeptide comprising an amino acid sequence that is at least 90% identical to a sequence of at least 10 contiguous amino acids in a sequence selected from the group consisting of: a polypeptide sequence of SEQ ID NO:Y; a polypeptide encoded by SEQ ID NO:X; and a polypeptide encoded by the cDNA in the related cDNA clone referenced in Table 1.

[0834] Also preferred is the above method wherein said step of comparing sequences is performed by comparing the amino acid sequence determined from a polypeptide molecule in said sample with said sequence selected from said group.

[0835] Also preferred is a method for identifying the species, tissue or cell type of a biological sample which method comprises a step of detecting polypeptide molecules in said sample, if any, comprising an amino acid sequence that is at least 90% identical to a sequence of at least 10 contiguous amino acids in a sequence selected from the group consisting of: polypeptide sequence of SEQ ID NO:Y; a polypeptide encoded by SEQ ID NO:X; and a polypeptide encoded by the cDNA in the related cDNA clone referenced in Table 1.

[0836] Also preferred is the above method for identifying the species, tissue or cell type of a biological sample, which method comprises a step of detecting polypeptide molecules comprising an amino acid sequence in a panel of at least two amino acid sequences, wherein at least one sequence in said panel is at least 90% identical to a sequence of at least 10 contiguous amino acids in a sequence selected from the above group.

[0837] Also preferred is a method for diagnosing in a subject a pathological condition associated with abnormal structure or expression of a nucleic acid sequence identified in Table 1 encoding a polypeptide, which method comprises a step of detecting in a biological sample obtained from said subject polypeptide molecules comprising an amino acid sequence in a panel of at least two amino acid sequences, wherein at least one sequence in said panel is at least 90% identical to a sequence of at least 10 contiguous amino acids in a sequence selected from the group consisting of: polypeptide sequence of SEQ ID NO:Y; a polypeptide encoded by SEQ ID NO:X; and a polypeptide encoded by the cDNA in the related cDNA clone referenced in Table 1.

[0838] In any of these methods, the step of detecting said polypeptide molecules includes using an antibody.

[0839] Also preferred is an isolated nucleic acid molecule comprising a nucleotide sequence which is at least 95% identical to a nucleotide sequence encoding a polypeptide wherein said polypeptide comprises an amino acid sequence that is at least 90% identical to a sequence of at least 10 contiguous amino acids in a sequence selected from the group consisting of: polypeptide sequence of SEQ ID NO:Y; a polypeptide encoded by SEQ ID NO:X; and a polypeptide encoded by the cDNA in the related cDNA clone referenced in Table 1.

[0840] Also preferred is an isolated nucleic acid molecule, wherein said nucleotide sequence encoding a polypeptide has been optimized for expression of said polypeptide in a prokaryotic host.

[0841] Also preferred is an isolated nucleic acid molecule, wherein said polypeptide comprises an amino acid sequence selected from the group consisting of: polypeptide sequence of SEQ ID NO:Y; a polypeptide encoded by SEQ ID NO:X; and a polypeptide encoded by the cDNA in the related cDNA clone referenced in Table 1.

[0842] Further preferred is a method of making a recombinant vector comprising inserting any of the above isolated nucleic acid molecule into a vector. Also preferred is the recombinant vector produced by this method. Also preferred is a method of making a recombinant host cell comprising introducing the vector into a host cell, as well as the recombinant host cell produced by this method.

[0843] Also preferred is a method of making an isolated polypeptide comprising culturing this recombinant host cell under conditions such that said polypeptide is expressed and recovering said polypeptide. Also preferred is this method of making an isolated polypeptide, wherein said recombinant host cell is a eukaryotic cell and said polypeptide is a human protein comprising an amino acid sequence selected from the group consisting of: polypeptide sequence of SEQ ID NO:Y; a polypeptide encoded by SEQ ID NO:X; and a polypeptide encoded by the cDNA in the related cDNA clone referenced in Table 1. The isolated polypeptide produced by this method is also preferred.

[0844] Also preferred is a method of treatment of an individual in need of an increased level of a protein activity, which method comprises administering to such an individual a Therapeutic comprising an amount of an isolated polypeptide, polynucleotide, immunogenic fragment or analogue thereof, binding agent, antibody, or antigen binding fragment of the claimed invention effective to increase the level of said protein activity in said individual.

[0845] Also preferred is a method of treatment of an individual in need of a decreased level of a protein activity, which method comprised administering to such an individual a Therapeutic comprising an amount of an isolated polypeptide, polynucleotide, immunogenic fragment or analogue thereof, binding agent, antibody, or antigen binding fragment of the claimed invention effective to decrease the level of said protein activity in said individual.

[0846] Having generally described the invention, the same will be more readily understood by reference to the following examples, which are provided by way of illustration and are not intended as limiting.

### EXAMPLES

### Example 1

### Isolation of a Selected cDNA Clone From the Deposited Sample

[0847] Each deposited cDNA clone is contained in a plasmid vector. Table 5 identifies the vectors used to construct the cDNA library from which each clone was isolated. In many cases, the vector used to construct the library is a phage vector from which a plasmid has been excised. The following correlates the related plasmid for each phage vector used in constructing the cDNA library. For example, where a particular clone is identified in Table 5 as being isolated in the vector “Lambda Zap,” the corresponding deposited clone is in “pBluescript.”

| Vector Used to Construct Library | Corresponding Deposited Plasmid |
|---|---|
| Lambda Zap | pBluescript (pBS) |
| Uni-Zap XR | pBluescript (pBS) |
| Zap Express | pBK |
| lafmid BA | plafmid BA |
| pSport1 | pSport1 |
| pCMVSport 2.0 | pCMVSport 2.0 |
| pCMVSport 3.0 | pCMVSport 3.0 |
| pCR ® 2.1 | pCR ® 2.1 |

[0848] Vectors Lambda Zap (U.S. Pat. Nos. 5,128,256 and 5,286,636), Uni-Zap XR (U.S. Pat. Nos. 5,128, 256 and 5,286,636), Zap Express (U.S. Pat. Nos. 5,128,256 and 5,286,636), pBluescript (pBS) (Short, J. M. et al., Nucleic Acids Res. 16:7583-7600 (1988); Alting-Mees, M. A. and Short, J. M., Nucleic Acids Res. 17:9494 (1989)) and pBK (Alting-Mees, M. A. et al., Strategies 5:58-61 (1992)) are commercially available from Stratagene Cloning Systems, Inc., 11011 N. Torrey Pines Road, La Jolla, CA, 92037. pBS contains an ampicillin resistance gene and pBK contains a neomycin resistance gene. Both can be transformed into E. coli strain XL-1 Blue, also available from Stratagene. pBS comes in 4 forms SK+, SK−m, KS+ and KS. The S and K refers to the orientation of the polylinker to the T7 and T3 primer sequences which flank the polylinker region (“S” is for SacI and “K” is for KpnI which are the first sites on each respective end of the linker). “+”or “−” refer to the orientation of the f1 origin of replication (“ori”), such that in one orientation, single stranded rescue initiated from the f1 ori generates sense strand DNA and in the other, antisense.

[0849] Vectors pSport1, pCMVSport 2.0 and pCMVSport 3.0, were obtained from Life Technologies, Inc., P.O. Box 6009, Gaithersburg, Md. 20897. All Sport vectors contain an ampicillin resistance gene and may be transformed into E. coli strain DH10B, also available from Life Technologies. (See, for instance, Gruber, C. E., et al., Focus 15:59 (1993).) Vector lafmid BA (Bento Soares, Columbia University, NY) contains an ampicillin resistance gene and can be transformed into E. coli strain XL-1 Blue. Vector pCR®2.1, which is available from Invitrogen, 1600 Faraday Avenue, Carlsbad, Calif. 92008, contains an ampicillin resistance gene and may be transformed into E. coli strain DH10B, available from Life Technologies. (See, for instance, Clark, J. M., Nuc. Acids Res. 16:9677-9686 (1988) and Mead, D. et al., Bio/Technology 9: (1991).) Preferably, a polynucleotide of the present invention does not comprise the phage vector sequences identified for the particular clone in Table 5, as well as the corresponding plasmid vector sequences designated above.

[0850] The deposited material in the sample assigned the ATCC Deposit Number cited by reference to Table 2 and 5 for any given cDNA clone also may contain one or more additional plasmids, each comprising a cDNA clone different from that given clone. Thus, deposits sharing the same ATCC Deposit Number contain at least a plasmid for each cDNA clone referenced in Table 1.

TABLE 5

| | | | ATCC |
|---|---|---|---|
| Libraries owned by Catalog | Catalog Description | Vector | Deposit |
| HUKA HUKB HUKC HUKD HUKE | Human Uterine Cancer | Lambda ZAP II | LP01 |
| HUKF HUKG | | | |
| HCNA HCNB | Human Colon | Lambda Zap II | LP01 |
| HFFA | Human Fetal Brain, random primed | Lambda Zap II | LP01 |
| HTWA | Resting T-Cell | Lambda ZAP II | LP01 |
| HBQA | Early Stage Human Brain, random | Lambda ZAP II | LP01 |
| | primed | | |
| HLMB HLMF HLMG HLMH HLMI | Breast lymph node CDNA library | Lambda ZAP II | LP01 |
| HLMJ HLMM HLMN | | | |
| HCQA HCQB | human colon cancer | Lamda ZAP II | LP01 |
| HMEA HMEC HMED HMEE HMEF | Human Microvascular Endothelial Cells, | Lambda ZAP II | LP01 |
| HMEG HMEI HMEJ HMEK HMEL | fract. A | | |
| HUSA HUSC | Human Umbilical Vein Endothelial | Lambda ZAP II | LP01 |
| | Cells, fract. A | | |
| HLQA HLQB | Hepatocellular Tumor | Lambda ZAP II | LP01 |
| HHGA HHGB HHGC HHGD | Hemangiopericytoma | Lambda ZAP II | LP01 |
| HSDM | Human Striatum Depression, re-rescue | Lambda ZAP II | LP01 |
| HUSH | H Umbilical Vein Endothelial Cells, frac | Lambda ZAP II | LP01 |
| | A, re-excision | | |
| HSGS | Salivary gland, subtracted | Lambda ZAP II | LP01 |
| HFXA HFXB HFXC HFXD HFXE | Brain frontal cortex | Lambda ZAP II | LP01 |
| HFXF HFXG HFXH | | | |
| HPQA HPQB HPQC | PERM TF274 | Lambda ZAP II | LP01 |
| HFXJ HFXK | Brain Frontal Cortex, re-excision | Lambda ZAP II | LP01 |
| HCWA HCWB HCWC HCWD | CD34 positive cells (Cord Blood) | ZAP Express | LP02 |
| HCWE HCWF HCWG HCWH HCWI | | | |
| HCWJ HCWK | | | |
| HCUA HCUB HCUC | CD34 depleted Buffy Coat (Cord Blood) | ZAP Express | LP02 |
| HRSM | A-14 cell line | ZAP Express | LP02 |
| HRSA | A1-CELL LINE | ZAP Express | LP02 |
| HCUD HCUE HCUF HCUG HCUH | CD34 depleted Buffy Coat (Cord | ZAP Express | LP02 |
| HCUI | Blood), re-excision | | |
| HBXE HBXF HBXG | H. Whole Brain #2, re-excision | ZAP Express | LP02 |
| HRLM | L8 cell line | ZAP Express | LP02 |
| HBXA HBXB HBXC HBXD | Human Whole Brain #2 - Oligo dT > | ZAP Express | LP02 |
| | 1.5Kb | | |
| HUDA HUDB HUDC | Testes | ZAP Express | LP02 |
| HHTM HHTN HHTO | H. hypothalamus, frac A; re-excision | ZAP Express | LP02 |
| HHTL | H. hypothalamus, frac A | ZAP Express | LP02 |
| HASA HASD | Human Adult Spleen | Uni-ZAP XR | LP03 |
| HFKC HFKD HFKE HFKF HFKG | Human Fetal Kidney | Uni-ZAP XR | LP03 |
| HE8A HE8B HE8C HE8D HE8E | Human 8 Week Whole Embryo | Uni-ZAP XR | LP03 |
| HE8F HE8M HE8N | | | |
| HGBA HGBD HGBE HGBF HGBG | Human Gall Bladder | Uni-ZAP XR | LP03 |
| HGBH HGBI | | | |
| HLHA HLHB HLHC HLHD HLHE | Human Fetal Lung III | Uni-ZAP XR | LP03 |
| HLHF HLHG HLHH HLHQ | | | |
| HPMA HPMB HPMC HPMD HPME | Human Placenta | Uni-ZAP XR | LP03 |
| HPMF HPMG HPMH | | | |
| HPRA HPRB HPRC HPRD | Human Prostate | Uni-ZAP XR | LP03 |
| HSIA HSIC HSID HSIE | Human Adult Small Intestine | Uni-ZAP XR | LP03 |
| HTEA HTEB HTEC HTED HTEE | Human Testes | Uni-ZAP XR | LP03 |
| HTEF HTEG HTEH HTEI HTEJ | | | |
| HTEK | | | |
| HTPA HTPB HTPC HTPD HTPE | Human Pancreas Tumor | Uni-ZAP XR | LP03 |
| HTTA HTTB HTTC HTTD HTTE | Human Testes Tumor | Uni-ZAP XR | LP03 |
| HTTF | | | |
| HAPA HAPB HAPC HAPM | Human Adult Pulmonary | Uni-ZAP XR | LP03 |
| HETA HETB HETC HETD HETE | Human Endometrial Tumor | Uni-ZAP XR | LP03 |
| HETF HETG HETH HETI | | | |
| HHFB HHFC HHFD HHFE HHFF | Human Fetal Heart | Uni-ZAP XR | LP03 |
| HHFG HHFH HHFI | | | |
| HHPB HHPC HHPD HHPE HHPF | Human Hippocampus | Uni-ZAP XR | LP03 |
| HHPG HHPH | | | |
| HCE1 HCE2 HCE3 HCE4 HCE5 | Human Cerebellum | Uni-ZAP XR | LP03 |
| HCEB HCEC HCED HCEE HCEF | | | |
| HCEG | | | |
| HUVB HUVC HUVD HUVE | Human Umbilical Vein, Endo. remake | Uni-ZAP XR | LP03 |
| HSTA HSTB HSTC HSTD | Human Skin Tumor | Uni-ZAP XR | LP03 |
| HTAA HTAB HTAC HTAD HTAE | Human Activated T-Cells | Uni-ZAP XR | LP03 |
| HFEA HFEB HFEC | Human Fetal Epithelium (Skin) | Uni-ZAP XR | LP03 |
| HJPA HJPB HJPC HJPD | HUMAN JURKAT MEMBRANE | Uni-ZAP XR | LP03 |
| | BOUND POLYSOMES | | |
| HESA | Human epithelioid sarcoma | Uni-Zap XR | LP03 |
| HLTA HLTB HLTC HLTD HLTE | Human T-Cell Lymphoma | Uni-ZAP XR | LP03 |
| HLTF | | | |
| HFTA HFTB HFTC HFTD | Human Fetal Dura Mater | Uni-ZAP XR | LP03 |
| HRDA HRDB HRDC HRDD HRDE | Human Rhabdomyosarcoma | Uni-ZAP XR | LP03 |
| HRDF | | | |
| HCAA HCAB HCAC | Cem cells cyclohexamide treated | Uni-ZAP XR | LP03 |
| HRGA HRGB HRGC HRGD | Raji Cells, cyclohexamide treated | Uni-ZAP XR | LP03 |
| HSUA HSUB HSUC HSUM | Supt Cells, cyclohexamide treated | Uni-ZAP XR | LP03 |
| HT4A HT4C HT4D | Activated T-Cells, 12 hrs. | Uni-ZAP XR | LP03 |
| HE9A HE9B HE9C HE9D HE9E | Nine Week Old Early Stage Human | Uni-ZAP XR | LP03 |
| HE9F HE9G HE9H HE9M HE9N | | | |
| HATA HATB HATC HATD HATE | Human Adrenal Gland Tumor | Uni-ZAP XR | LP03 |
| HT5A | Activated T-Cells, 24 hrs. | Uni-ZAP XR | LP03 |
| HFGA HFGM | Human Fetal Brain | Uni-ZAP XR | LP03 |
| HNEA HNEB HNEC HNED HNEE | Human Neutrophil | Uni-ZAP XR | LP03 |
| HBGB HBGD | Human Primary Breast Cancer | Uni-ZAP XR | LP03 |
| HBNA HBNB | Human Normal Breast | Uni-ZAP XR | LP03 |
| HCAS | Cem Cells, cyclohexamide treated, | Uni-ZAP XR | LP03 |
| | subtra | | |
| HHPS | Human Hippocampus, subtracted | pBS | LP03 |
| HKCS HKCU | Human Colon Cancer, subtracted | pBS | LP03 |
| HRGS | Raji cells, cyclohexamide treated, | pBS | LP03 |
| | subtracted | | |
| HSUT | Supt cells, cyclohexamide treated, | pBS | LP03 |
| | differentially expressed | | |
| HT4S | Activated T-Cells, 12 hrs, subtracted | Uni-ZAP XR | LP03 |
| HCDA HCDB HCDC HCDD HCDE | Human Chondrosarcoma | Uni-ZAP XR | LP03 |
| HOAA HOAB HOAC | Human Osteosarcoma | Uni-ZAP XR | LP03 |
| HTLA HTLB HTLC HTLD HTLE | Human adult testis, large inserts | Uni-ZAP XR | LP03 |
| HTLF | | | |
| HLMA HLMC HLMD | Breast Lymph node cDNA library | Uni-ZAP XR | LP03 |
| H6EA H6EB H6EC | HL-60, PMA 4H | Uni-ZAP XR | LP03 |
| HTXA HTXB HTXC HTXD HTXE | Activated T-Cell (12 hs)/Thiouridine | Uni-ZAP XR | LP03 |
| HTXF HTXG HTXH | labelledEco | | |
| HNFA HNFB HNFC HNFD HNFE | Human Neutrophil, Activated | Uni-ZAP XR | LP03 |
| HNFF HNFG HNFH HNFJ | | | |
| HTOB HTOC | HUMAN TONSILS, FRACTION 2 | Uni-ZAP XR | LP03 |
| HMGB | Human OB MG63 control fraction I | Uni-ZAP XR | LP03 |
| HOPB | Human OB HOS control fraction I | Uni-ZAP XR | LP03 |
| HORB | Human OB HOS treated (10 nM E2) | Uni-ZAP XR | LP03 |
| | fraction I | | |
| HSVA HSVB HSVC | Human Chronic Synovitis | Uni-ZAP XR | LP03 |
| HROA | HUMAN STOMACH | Uni-ZAP XR | LP03 |
| HBJA HBJB HBJC HBJD HBJE | HUMAN B CELL LYMPHOMA | Uni-ZAP XR | LP03 |
| HBJF HBJG HBJH HBJI HBJJ HBJK | | | |
| HCRA HCRB HCRC | human corpus colosum | Uni-ZAP XR | LP03 |
| HODA HODB HODC HODD | human ovarian cancer | Uni-ZAP XR | LP03 |
| HDSA | Dermatofibrosarcoma Protuberance | Uni-ZAP XR | LP03 |
| HMWA HMWB HMWC HMWD | Bone Marrow Cell Line (RS4;11) | Uni-ZAP XR | LP03 |
| HMWE HMWF HMWG HMWH | | | |
| HMWI HMWJ | | | |
| HSOA | stomach cancer (human) | Uni-ZAP XR | LP03 |
| HERA | SKIN | Uni-ZAP XR | LP03 |
| HMDA | Brain-medulloblastoma | Uni-ZAP XR | LP03 |
| HGLA HGLB HGLD | Glioblastoma | Uni-ZAP XR | LP03 |
| HEAA | H. Atrophic Endometrium | Uni-ZAP XR | LP03 |
| HBCA HBCB | H. Lymph node breast Cancer | Uni-ZAP XR | LP03 |
| HPWT | Human Prostate BPH, re-excision | Uni-ZAP XR | LP03 |
| HFVG HFVH HFVI | Fetal Liver, subtraction II | pBS | LP03 |
| HNFI | Human Neutrophils, Activated, re- | pBS | LP03 |
| | excision | | |
| HBMB HBMC HBMD | Human Bone Marrow, re-excision | pBS | LP03 |
| HKML HKMM HKMN | H. Kidney Medulla, re-excision | pBS | LP03 |
| HKIX HKIY | H. Kidney Cortex, subtracted | pBS | LP03 |
| HADT | H. Amygdala Depression, subtracted | pBS | LP03 |
| H6AS | H1-60, untreated, subtracted | Uni-ZAP XR | LP03 |
| H6ES | HL-60, PMA 4H, subtracted | Uni-ZAP XR | LP03 |
| H6BS | HL-60, RA 4h, Subtracted | Uni-ZAP XR | LP03 |
| H6CS | HL-60, PMA ld, subtracted | Uni-ZAP XR | LP03 |
| HTXJ HTXK | Activated T-cell(12 h)/Thiouridine-re- | Uni-ZAP XR | LP03 |
| | excision | | |
| HMSA HMSB HMSC HMSD HMSE | Monocyte activated | Uni-ZAP XR | LP03 |
| HMSF HMSG HMSH HMSI HMSJ | | | |
| HMSK | | | |
| HAGA HAGB HAGC HAGD HAGE | Human Amygdala | Uni-ZAP XR | LP03 |
| HAGF | | | |
| HSRA HSRB HSRE | STROMAL-OSTEOCLASTOMA | Uni-ZAP XR | LP03 |
| HSRD HSRF HSRG HSRH | Human Osteoclastoma Stromal Cells - | Uni-ZAP XR | LP03 |
| | unamplified | | |
| HSQA HSKB HSQC HSQD HSQE | Stromal cell TF274 | Uni-ZAP XR | LP03 |
| HSQF HSQG | | | |
| HSKA HSKB HSKC HSKD HSKE | Smooth muscle, serum treated | Uni-ZAP XR | LP03 |
| HSKF HSKZ | | | |
| HSLA HSLB HSLC HSLD HSLE | Smooth muscle, control | Uni-ZAP XR | LP03 |
| HSLF HSLG | | | |
| HSDA HSDD HSDE HSDF HSDG | Spinal cord | Uni-ZAP XR | LP03 |
| HSDH | | | |
| HPWS | Prostate-BPH subtracted II | pBS | LP03 |
| HSKW HSKX HSKY | Smooth Muscle- HASTE normalized | pBS | LP03 |
| HFPB HFPC HFPD | H. Frontal cortex, epileptic; re-excision | Uni-ZAP XR | LP03 |
| HSDI HSDJ HSDK | Spinal Cord, re-excision | Uni-ZAP XR | LP03 |
| HSKN HSKO | Smooth Muscle Serum Treated, Norm | pBS | LP03 |
| HSKG HSKH HSKI | Smooth muscle, serum induced, re-exc | pBS | LP03 |
| HFCA HFCB HFCC HFCD HFCE | Human Fetal Brain | Uni-ZAP XR | LP04 |
| HFCF | | | |
| HPTA HPTB HPTD | Human Pituitary | Uni-ZAP XR | LP04 |
| HTHB HTHC HTHD | Human Thymus | Uni-ZAP XR | LP04 |
| HE6B HE6C HE6D HE6E HE6F | Human Whole Six Week Old Embryo | Uni-ZAP XR | LP04 |
| HE6G HE6S | | | |
| HSSA HSSB HSSC HSSD HSSE | Human Synovial Sarcoma | Uni-ZAP XR | LP04 |
| HSSF HSSG HSSH HSSI HSSJ | | | |
| HSSK | | | |
| HE7T | 7 Week Old Early Stage Human, | Uni-ZAP XR | LP04 |
| | subtracted | | |
| HEPA HEPB HEPC | Human Epididymus | Uni-ZAP XR | LP04 |
| HSNA HSNB HSNC HSNM HSNN | Human Synovium | Uni-ZAP XR | LP04 |
| HPFB HPFC HPFD HPFE | Human Prostate Cancer, Stage C fraction | Uni-ZAP XR | LP04 |
| HE2A HE2D HE2E HE2H HE2I | 12 Week Old Early Stage Human | Uni-ZAP XR | LP04 |
| HE2M HE2N HE2O | | | |
| HE2B HE2C HE2F HE2G HE2P | 12 Week Old Early Stage Human, II | Uni-ZAP XR | LP04 |
| HE2Q | | | |
| HPTS HPTT HPTU | Human Pituitary, subtracted | Uni-ZAP XR | LP04 |
| HAUA HAUB HAUC | Amniotic Cells - TNF induced | Uni-ZAP XR | LP04 |
| HAQA HAQB HAQC HAQD | Amniotic Cells - Primary Culture | Uni-ZAP XR | LP04 |
| HWTA HWTB HWTC | wilm's tumor | Uni-ZAP XR | LP04 |
| HBSD | Bone Cancer, re-excision | Uni-ZAP XR | LP04 |
| HSGB | Salivary gland, re-excision | Uni-ZAP XR | LP04 |
| HSJA HSJB HSJC | Smooth muscle-ILb induced | Uni-ZAP XR | LP04 |
| HSXA HSXB HSXC HSXD | Human Substantia Nigra | Uni-ZAP XR | LP04 |
| HSHA HSHB HSHC | Smooth muscle, IL1b induced | Uni-ZAP XR | LP04 |
| HOUA HOUB HOUC HOUD HOUE | Adipocytes | Uni-ZAP XR | LP04 |
| HPWA HPWB HPWC HPWD HPWE | Prostate BPH | Uni-ZAP XR | LP04 |
| HELA HELB HELC HELD HELE | Endothelial cells-control | Uni-ZAP XR | LP04 |
| HELF HELG HELH | | | |
| HEMA HEMB HEMC HEMD HEME | Endothelial-induced | Uni-ZAP XR | LP04 |
| HEMF HEMG HEMH | | | |
| HBIA HBIB HBIC | Human Brain, Striatum | Uni-ZAP XR | LP04 |
| HHSA HHSB HHSC HHSD HHSE | Human Hypothalmus, Schizophrenia | Uni-ZAP XR | LP04 |
| HNGA HNGB HNGC HNGD HNGE | neutrophils control | Uni-ZAP XR | LP04 |
| HNGF HNGG HNGH HNGI HNGJ | | | |
| HNHA HNHB HNHC HNHD HNHE | Neutrophils IL-1 and LPS induced | Uni-ZAP XR | LP04 |
| HNHF HNHG HNHH HNHI HNHJ | | | |
| HSDB HSDC | STRIATUM DEPRESSION | Uni-ZAP XR | LP04 |
| HHPT | Hypothalamus | Uni-ZAP XR | LP04 |
| HSAT HSAU HSAV HSAW HSAX | Anergic T-cell | Uni-ZAP XR | LP04 |
| HSAY HSAZ | | | |
| HBMS HNMT HBMU HBMV | Bone marrow | Uni-ZAP XR | LP04 |
| HBMW HBMX | | | |
| HOEA HOEB HOEC HOED HOEE | Osteoblasts | Uni-ZAP XR | LP04 |
| HOEF HOEJ | | | |
| HAIA HAIB HAIC HAID HAIE | Epithelial-TNFa and INF induced | Uni-ZAP XR | LP04 |
| HAIF | | | |
| HTGA HTGB HTGC HTGD | Apoptotic T-cell | Uni-ZAP XR | LP04 |
| HMCA HMCB HMCC HMCD | Macrophage-oxLDL | Uni-ZAP XR | LP04 |
| HMCE | | | |
| HMAA HMAB HMAC HMAD | Macrophage (GM-CSF treated) | Uni-ZAP XR | LP04 |
| HMAE HMAF HMAG | | | |
| HPHA | Normal Prostate | Uni-ZAP XR | LP04 |
| HPIA HPIB HPIC | LNCAP prostate cell line | Uni-ZAP XR | LP04 |
| HPJA HPJB HPJC | PC3 Prostate cell line | Uni-ZAP XR | LP04 |
| HOSE HOSF HOSG | Human Osteoclastoma, re-excision | Uni-ZAP XR | LP04 |
| HTGE HTGF | Apoptotic T-cell, re-excision | Uni-ZAP XR | LP04 |
| HMAJ HMAK | H Macrophage (GM-CSF treated), re- | Uni-ZAP XR | LP04 |
| | excision | | |
| HACE HACC HACD | Human Adipose Tissue, re-excision | Uni-ZAP XR | LP04 |
| HFPA | H. Frontal Cortex, Epileptic | Uni-ZAP XR | LP04 |
| HFAA HFAB HFAC HFAD HFAE | Alzheimers, spongy change | Uni-ZAP XR | LP04 |
| HFAM | Frontal Lobe, Dementia | Uni-ZAP XR | LP04 |
| HMIA HMIB HMIC | Human Manic Depression Tissue | Uni-ZAP XR | LP04 |
| HTSA HTSE HTSF HTSG HTSH | Human Thymus | pBS | LP05 |
| HPBA HPBE HPBC HPBD HPBE | Human Pineal Gland | pBS | LP05 |
| HSAA HSAB HSAC | HSA 172 Cells | pBS | LP05 |
| HSBA HSBB HSBC HSBM | HSC 172 cells | pBS | LP05 |
| HJAA HJAB HJAC HJAD | Jurkat T-cell G1 phase | pBS | LP05 |
| HJBA HJBB HJBC HJBD | Jurkat T-Cell, S phase | pBS | LP05 |
| HAFA HAFB | Aorta endothelial cells + TNF-a | pBS | LP05 |
| HAWA HAWB HAWC | Human White Adipose | pBS | LP05 |
| HTNA HTNB | Human Thyroid | pBS | LP05 |
| HONA | Normal Ovary, Premenopausal | pBS | LP05 |
| HARA HARB | Human Adult Retina | pBS | LP05 |
| HLJA HLJB | Human Lung | pCMVSport 1 | LP06 |
| HOFM HOFN HOFO | H. Ovarian Tumor, II, OV5232 | pCMVSport 2.0 | LP07 |
| HOGA HOGB HOGC | OV 10-3-95 | pCMVSport 2.0 | LP07 |
| HCGL | CD34 + cells, II | pCMVSport 2.0 | LP07 |
| HDLA | Hodgkin's Lymphoma I | pCMVSport 2.0 | LP07 |
| HDTA HDTB HDTC HDTD HDTE | Hodgkin's Lymphoma II | pCMVSport 2.0 | LP07 |
| HKAA HKAB HKAC HKAD HKAE | Keratinocyte | pCMVSport2.0 | LP07 |
| HKAF HKAG HKAH | | | |
| HCIM | CAPFINDER, Crohn's Disease, lib 2 | pCMVSport 2.0 | LP07 |
| HKAL | Keratinocyte, lib 2 | pCMVSport2.0 | LP07 |
| HKAT | Keratinocyte, lib 3 | pCMVSport2.0 | LP07 |
| HNDA | Nasal polyps | CMVSport2.0 | LP07 |
| HDRA | H. Primary Dendritic Cells, lib 3 | pCMVSport2.0 | LP07 |
| HOHA HOHB HOHC | Human Osteoblasts II | pCMVSport2.0 | LP07 |
| HLDA HLDB HLDC | Liver, Hepatoma | pCMVSport3.0 | LP08 |
| HLDN HLDO HLDP | Human Liver, normal | pCMVSport3.0 | LP08 |
| HMTA | pBMC stimulated w/poly I/C | pCMVSport3.0 | LP08 |
| HNTA | NTERA2, control | pCMVSport3.0 | LP08 |
| HDPA HDPB HDPC HDPD HDPF | Primary Dendritic Cells, lib 1 | pCMVSport3.0 | LP08 |
| HDPG HDPH HDPI HDPJ HDPK | | | |
| HDPM HDPN HDPO HDPP | Primary Dendritic cells, frac 2 | pCMVSport3.0 | LP08 |
| HMUA HMUB HMUC | Myoloid Progenitor Cell Line | pCMVSport3.0 | LP08 |
| HHEA HHEB HHEC HHED | T Cell helper I | pCMVSport3.0 | LP08 |
| HHEM HHEN HHEO HHEP | T cell helper II | pCMVSport3.0 | LP08 |
| HEQA HEQB HEQC | Human endometrial stromal cells | pCMVSport3.0 | LP08 |
| HJMA HJMB | Human endometrial stromal cells-treated | pCMVSport3.0 | LP08 |
| | with progesterone | | |
| HSWA HSWB HSWC | Human endometrial stromal cells-treated | pCMVSport3.0 | LP08 |
| | with estradiol | | |
| HSYA HSYB HSYC | Human Thymus Stromal Cells | pCMVSport3.0 | LP08 |
| HLWA HLWB HLWC | Human Placenta | pCMVSport3.0 | LP08 |
| HRAA HRAB HRAC | Rejected Kidney, lib 4 | pCMVSport3.0 | LP08 |
| HMTM | PCR, pBMC I/C treated | pCRII | LP09 |
| HMJA | H. Meniingima, M6 | pSport 1 | LP10 |
| HMKA HMKB HMKC HMKD | H. Meningima, M1 | pSport 1 | LP10 |
| HMKE | | | |
| HUSG HUSI | Human umbilical vein endothelial cells, | pSport 1 | LP10 |
| | IL-4 induced | | |
| HUSX HUSY | Human Umbilical Vein Endothelial | pSport 1 | LP10 |
| | Cells, uninduced | | |
| HOFA | Ovarian Tumor I, OV5232 | pSport 1 | LP10 |
| HCFA HCFB HCFC HCFD | T-Cell PHA 16 hrs | pSport 1 | LP10 |
| HCFL HCFM HCFN HCFO | T-Cell PHA 24 hrs | pSport 1 | LP10 |
| HADA HADC HADD HADE HADF | Human Adipose | pSport 1 | LP10 |
| HADG | | | |
| HOVA HOVB HOVC | Human Ovary | pSport 1 | LP10 |
| HTWB HTWC HTWD HTWE HTWF | Resting T-Cell Library, II | pSport 1 | LP10 |
| HMMA | Spleen metastic melanoma | pSport 1 | LP10 |
| HLYA HLYB HLYC HLYD HLYE | Spleen, Chronic lymphocytic leukemia | pSport 1 | LP10 |
| HCGA | CD34 + cell, I | pSport 1 | LP10 |
| HEOM HEON | Human Eosinophils | pSport 1 | LP10 |
| HTDA | Human Tonsil, Lib 3 | pSport 1 | LP10 |
| HSPA | Salivary Gland, Lib 2 | pSport 1 | LP10 |
| HCHA HCHB HCHC | Breast Cancer cell line, MDA 36 | pSport 1 | LP10 |
| HCHM HCHN | Breast Cancer Cell line, angiogenic | pSport 1 | LP10 |
| HCIA | Crohn's Disease | pSport 1 | LP10 |
| HDAA HDAB HDAC | HEL cell line | pSport 1 | LP10 |
| HABA | Human Astrocyte | pSport 1 | LP10 |
| HUFA HUFB HUFC | Ulcerative Colitis | pSport 1 | LP10 |
| HNTM | NTERA2 + retinoic acid, 14 days | pSport 1 | LP10 |
| HDQA | Primary Dendritic cells, CapFinder2, frac | pSport I | LP10 |
| | 1 | | |
| HDQM | Primary Dendritic Cells, CapFinder, frac | pSport 1 | LP10 |
| | 2 | | |
| HLDX | Human Liver, normal, CapFinder | pSport 1 | LP10 |
| HULA HULB HULC | Human Dermal Endothelial | pSport 1 | LP10 |
| | Cells, untreated | | |
| HUMA | Human Dermal Endothelial cells, treated | pSport 1 | LP10 |
| HCJA | Human Stromal Endometrial fibroblasts, | pSport 1 | LP10 |
| | untreated | | |
| HCJM | Human Stromal endometrial fibroblasts, | pSport 1 | LP10 |
| | treated w/ estradiol | | |
| HEDA | Human Stromal endometrial fibroblasts, | pSport 1 | LP10 |
| | treated with progesterone | | |
| HFNA | Human ovary tumor cell OV350721 | pSport 1 | LP10 |
| HKGA HKGB HKGC HKGD | Merkel Cells | pSport 1 | LP10 |
| HISA HISB HISC | Pancreas Islet Cell Tumor | pSport 1 | LP10 |
| HLSA | Skin, burned | pSport 1 | LP10 |
| HBZA | Prostate, BPH, Lib 2 | pSport 1 | LP10 |
| HBZS | Prostate BPH, Lib 2, subtracted | pSport 1 | LP10 |
| HFIA HFIB HEIC | Synovial Fibroblasts (control) | pSport 1 | LP10 |
| HFIH HFII HFIJ | Synovial hypoxia | pSport 1 | LP10 |
| HFIT HFIU HFIV | Synovial IL-1/TNF stimulated | pSport 1 | LP10 |
| HGCA | Messangial cell, frac I | pSport 1 | LP10 |
| HMVA HMVB HMVC | Bone Marrow Stromal Cell, untreated | pSport 1 | LP10 |
| HFIX HFIY HFIZ | Synovial Fibroblasts (II1/TNF), subt | pSport 1 | LP10 |
| HFOX HFOY HFOZ | Synovial hypoxia-RSF subtracted | pSport 1 | LP10 |
| HMQA HMQB HMQC HMQD | Human Activated Monocytes | Uni-ZAP XR | LP11 |
| HLIA HLIB HLIC | Human Liver | pCMVSport 1 | LP012 |
| HHBA HHBB HHBC HHBD HHBE | Human Heart | pCMVSport 1 | LP012 |
| HBBA HBBB | Human Brain | pCMVSport 1 | LP012 |
| HLJA HLJB HLJC HLJD HLJE | Human Lung | pCMVSport 1 | LP012 |
| HOGA HOGB HOGC | Ovarian Tumor | pCMVSport 2.0 | LP012 |
| HTJM | Human Tonsils, Lib 2 | pCMVSport 2.0 | LP012 |
| HAMF HAMG | KMH2 | pCMVSport 3.0 | LP012 |
| HAJA HAJB HAIC | L428 | pCMVSport 3.0 | LP012 |
| HWBA HWBB HWBC HWBD | Dendritic cells, pooled | pCMVSport 3.0 | LP012 |
| HWBE | | | |
| HWAA HWAB HWAC HWAD | Human Bone Marrow, treated | pCMVSport 3.0 | LP012 |
| HWAE | | | |
| HYAA HYAB HYAC | B Cell lymphoma | pCMVSport 3.0 | LP012 |
| HWHG HWHH HWHI | Healing groin wound, 6.5 hours post | pCMVSport 3.0 | LP012 |
| | incision | | |
| HWHP HWHQ HWHR | Healing groin wound; 7.5 hours post | pCMVSport 3.0 | LP012 |
| | incision | | |
| HARM | Healing groin wound - zero hr post- | pCMVSport 3.0 | LP012 |
| | incision (control) | | |
| HBIM | Olfactory epithelium; nasalcavity | pCMVSport 3.0 | LP012 |
| HWDA | Healing Abdomen wound; 70 & 90 min | pCMVSport 3.0 | LP012 |
| | post incision | | |
| HWEA | Healing Abdomen Wound; 15 days post | pCMVSport 3.0 | LP012 |
| | incision | | |
| HMJA | Healing Abdomen Wound; 21 & 29 days | pCMVSport 3.0 | LP012 |
| HNAL | Human Tongue, frac 2 | pSport1 | LP012 |
| HMJA | H. Meniingima, M6 | pSport1 | LP012 |
| HMKA HMKB HMKC HMKD | H. Meningima, M1 | pSport1 | LP012 |
| HMKE | | | |
| HOFA | Ovarian Tumor I, OV5232 | pSport1 | LP012 |
| HCFA HCFB HCFC HCFD | T-Cell PHA 16 hrs | pSport1 | LP012 |
| HCFL HCFM HCFN HCFO | T-Cell PHA 24 hrs | pSport1 | LP012 |
| HMMA HMMB HMMC | Spleen metastic melanoma | pSport1 | LP012 |
| HTDA | Human Tonsil, Lib 3 | pSport1 | LP012 |
| HDBA | Human Fetal Thymus | pSport1 | LP012 |
| HDUA | Pericardium | pSport1 | LP012 |
| HBZA | Prostate, BPH, Lib 2 | pSport1 | LP012 |
| HWCA | Larynx tumor | pSport1 | LP012 |
| HWKA | Normal lung | pSport1 | LP012 |
| HSMB | Bone marrow stroma, treated | pSport1 | LP012 |
| HBHM | Normal trachea | pSport1 | LP012 |
| HLFC | Human Larynx | pSport1 | LP012 |
| HLRB | Siebben Polyposis | pSport1 | LP012 |
| HNIA | Mammary Gland | pSport1 | LP012 |
| HNJB | Palate carcinoma | pSport1 | LP012 |
| HNKA | Palate normal | pSport1 | LP012 |
| HMZA | Pharynx carcinoma | pSport1 | LP012 |
| HABG | Cheek Carcinoma | pSport1 | LP012 |
| HMZM | Pharynx Carcinoma | pSport1 | LP012 |
| HDRM | Larynx Carcinoma | pSport1 | LP012 |
| HVAA | Pancreas normal PCA4 No | pSport1 | LP012 |
| HICA | Tongue carcinoma | pSport1 | LP012 |
| HUKA HUKB HUKC HUKD HUKE | Human Uterine Cancer | Lambda ZAP II | LP013 |
| HFFA | Human Fetal Brain, random primed | Lambda ZAP II | LP013 |
| HTUA | Activated T-cell labeled with 4-thioluri | Lambda ZAP II | LP013 |
| HBQA | Early Stage Human Brain, random | Lambda ZAP II | LP013 |
| | primed | | |
| HMEB | Human microvascular Endothelial cells, | Lambda ZAP II | LP013 |
| | fract. B | | |
| HUSH | Human Umbilical Vein Endothelial | Lambda ZAP II | LP013 |
| | cells, fract. A, re-excision | | |
| HLQC HLQD | Hepatocellular tumor, re-excision | Lambda ZAP II | LP013 |
| HTWJ HTWK HTWL | Resting T-cell, re-excision | Lambda ZAP II | LP013 |
| HF6S | Human Whole 6 week Old Embryo (II), | pBluescript | LP013 |
| | subt | | |
| HHPS | Human Hippocampus, subtracted | pBluescript | LP013 |
| HL1S | LNCAP, differential expression | pBluescript | LP013 |
| HLHS HLHT | Early Stage Human Lung, Subtracted | pBluescript | LP013 |
| HSUS | Supt cells, cyclohexamide treated, | pBluescript | LP013 |
| | subtracted | | |
| HSUT | Supt cells, cyclohexamide treated, | pBluescript | LP013 |
| | differentially expressed | | |
| HSDS | H. Striatum Depression, subtracted | pBluesript | LP013 |
| HPTZ | Human Pituitary, Subtracted VII | pBluescript | LP013 |
| HSDX | H. Striatum Depression, subt II | pBluescript | LP013 |
| HSDZ | H. Striatum Depression, subt | pBluescript | LP013 |
| HPBA HPBB HPBC HPBD HPBE | Human Pineal Gland | pBluescript SK- | LP013 |
| HRTA | Colorectal Tumor | pBluescript SK- | LP013 |
| HSBA HSBB HSBC HSBM | HSC172 cells | pBluescript SK- | LP013 |
| HJAA HJAB HJAC HJAD | Jurkat T-cell G1 phase | pBluescript SK- | LP013 |
| HJBA HJBB HJBC HJBD | Jurkat T-cell, S1 phase | pBluescript SK- | LP013 |
| HTNA HTNB | Human Thyroid | pBluescript SK- | LP013 |
| HAHA HAHB | Human Adult Heart | Uni-ZAP XR | LP013 |
| HE6A | Whole 6 week Old Embryo | Uni-ZAP XR | LP013 |
| HFCA HPCB HFCC HFCD HFCE | Human Fetal Brain | Uni-ZAP XR | LP013 |
| HFKC HFKD HFKE HFKF HFKG | Human Fetal Kidney | Uni-ZAP XR | LP013 |
| HGBA HGBD HGBE HGBF HGBG | Human Gall Bladder | Uni-ZAP XR | LP013 |
| HPRA HPRB HPRC HPRD | Human Prostate | Uni-ZAP XR | LP013 |
| HTEA HTEB HTEC HTED HTEE | Human Testes | Uni-ZAP XR | LP013 |
| HYTA HTTB HTTC HTTD HTTE | Human Testes Tumor | Uni-ZAP XR | LP013 |
| HYBA HYBB | Human Fetal Bone | Uni-ZAP XR | LP013 |
| HFLA | Human Fetal Liver | Uni-ZAP XR | LP013 |
| HHFB HHFC HHFD HHFE HHFF | Human Fetal Heart | Uni-ZAP XR | LP013 |
| HUVB HUVC HUVD HUVE | Human Umbilical Vein, End, remake | Uni-ZAP XR | LP013 |
| HTHB HTHC HTHD | Human Thymus | Uni-ZAP XR | LP013 |
| HSTA HSTB HSTC HSTD | Human Skin Tumor | Uni-ZAP XR | LP013 |
| HTAA HTAB HTAC HTAD HTAE | Human Activated T-cells | Uni-ZAP XR | LP013 |
| HFEA HFEB HFEC | Human Fetal Epithelium (skin) | Uni-ZAP XR | LP013 |
| HJPA HJPB HJPC HJPD | Human Jurkat Membrane Bound | Uni-ZAP XR | LP013 |
| | Polysomes | | |
| HESA | Human Epithelioid Sarcoma | Uni-ZAP XR | LP013 |
| HALS | Human Adult Liver, Subtracted | Uni-ZAP XR | LP013 |
| HFTA HFTB HFTC HFTD | Human Fetal Dura Mater | Uni-ZAP XR | LP013 |
| HCAA HCAB HCAC | Cem cells, cyclohexamide treated | Uni-ZAP XR | LP013 |
| HRGA HRGB HRGC HRGD | Raji Cells, cyclohexamide treated | Uni-ZAP XR | LP013 |
| HE9A HE9B HE9C HE9D HE9E | Nine Week Old Early Stage Human | Uni-ZAP XR | LP013 |
| HSFA | Human Fibrosarcoma | Uni-ZAP XR | LP013 |
| HATA HATB HATC HATD HATE | Human Adrenal Gland Tumor | Uni-ZAP XR | LP013 |
| HTRA | Human Trachea Tumor | Uni-ZAP XR | LP013 |
| HE2A HE2D HE2E HE2H HE2I | 12 Week Old Early Stage Human | Uni-ZAP XR | LP013 |
| HE2B HE2C HE2F HE2G HE2P | 12 Week Old Early Stage Human, II | Uni-ZAP XR | LP013 |
| HNEA HNEB HNEC HNED HNEE | Human Neutrophil | Uni-ZAP XR | LP013 |
| HBGA | Human Primary Breast Cancer | Uni-ZAP XR | LP013 |
| HPTS HPTT HPTU | Human Pituitary, subtracted | Uni-ZAP XR | LP013 |
| HMQA HMQB HMQC HMQD | Human Activated Monocytes | Uni-ZAP XR | LP013 |
| HOAA HOAB HOAC | Human Osteosarcoma | Uni-ZAP XR | LP013 |
| HTOA HTOD HTOE HTOF HTOG | human tonsils | Uni-ZAP XR | LP013 |
| HMGB | Human OB MG63 control fraction I | Uni-ZAP XR | LP013 |
| HOPB | Human OB HOS control fraction I | Uni-ZAP XR | LP013 |
| HOQB | Human OB HOS treated (1 nM E2) | Uni-ZAP XR | LP013 |
| | fraction I | | |
| HBCM | Uterus; normal | pSport 1 | LP014 |
| HCDM | Testis; normal | pSport 1 | LP014 |
| HDJM | Brain; normal | pSport 1 | LP014 |
| HEFM | Adrenal Gland, normal | pSport 1 | LP014 |
| HBAA | Rectum normal | pSport 1 | LP014 |
| HFDM | Rectum tumour | pSport 1 | LP014 |
| HGAM | Colon, normal | pSport 1 | LP014 |
| HHMM | Colon, tumour | pSport 1 | LP014 |
| HCLB HCLC | Human Lung Cancer | Lambda Zap II | LP015 |
| HRLA | L1 Cell line | ZAP Express | LP015 |
| HHAM | Hypothalamus, Alzheimer's | CMVSport 3.0 | LP015 |
| HKBA | Ku 812F Basophils Line | pSport 1 | LP015 |
| HS2S | Saos2, Dexamethosome Treated | pSport 1 | LP016 |
| HA5A | Lung Carcinoma A549 TNFalpha | pSport 1 | LP016 |
| | activated | | |
| HTFM | TF-1 Cell Line GM-CSF Treated | pSport 1 | LP016 |
| HYAS | Thyroid Tumour | pSport 1 | LP016 |
| HUTS | Larynx Normal | pSport 1 | LP016 |
| HXOA | Larynx Tumor | pSport 1 | LP016 |
| HEAH | Ea.hy.926 cell line | pSport 1 | LP016 |
| HINA | Adenocarcinoma Human | pSport 1 | LP016 |
| HRMA | Lung Mesothelium | pSport 1 | LP016 |
| HLCL | Human Pre-Differentiated Adipocytes | Uni-Zap XR | LP017 |
| HS2A | Saos2 Cells | pSport 1 | LP020 |
| HS2I | Saos2 Cells; Vitamin D3 Treated | pSport 1 | LP020 |
| HUCM | CHME Cell Line, untreated | pSport 1 | LP020 |
| HEPN | Aryepiglottis Normal | pSport 1 | LP020 |
| HPSN | Sinus Piniformis Tumour | pSport 1 | LP020 |
| HNSA | Stomach Normal | pSport 1 | LP020 |
| HNSM | Stomach Tumour | pSport 1 | LP020 |
| HNLA | Liver Normal Met5No | pSport 1 | LP020 |
| HUTA | Liver Tumour Met 5 Tu | pSport 1 | LP020 |
| HOCN | Colon Normal | pSport 1 | LP020 |
| HOCT | Colon Tumor | pSport I | LP020 |
| HTNT | Tongue Tumour | pSport 1 | LP020 |
| HLXN | Larynx Normal | pSport 1 | LP020 |
| HLXT | Larynx Tumour | pSport 1 | LP020 |
| HTYN | Thymus | pSport 1 | LP020 |
| HPLN | Placenta | pSport 1 | LP020 |
| HTNG | Tongue Normal | pSport 1 | LP020 |
| HZAA | Thyroid Normal (SDCA2 No) | pSport 1 | LP020 |
| HWES | Thyroid Thyroiditis | pSport 1 | LP020 |
| HFHD | Ficolled Human Stromal Cells, 5Fu | pTrip1Ex2 | LP021 |
| | treated | | |
| HFHM, HFHN | Ficolled Human Stromal Cells, | pTrip1Ex2 | LP021 |
| | Untreated | | |
| HPCI | Hep G2 Cells, lambda library | lambda Zap-CMV | LP021 |
| | | XR | |
| HBCA, HBCB, HBCC | H. Lymph node breast Cancer | Uni-ZAP XR | LP021 |
| HCOK | Chondrocytes | pSPORT1 | LP022 |
| HDCA, HDCB, HDCC | Dendritic Cells From CD34 Cells | pSPORT1 | LP022 |
| HDMA, HDMB | CD40 activated monocyte dendritic cells | pSPORT1 | LP022 |
| HDDM, HDDN, HDDO | LPS activated derived dendritic cells | pSPORT1 | LP022 |
| HPCR | Hep G2 Cells, PCR library | lambda Zap-CMV | LP022 |
| | | XR | |
| HAAA, HAAB, HAAC | Lung, Cancer (4005313A3): Invasive | pSPORT1 | LP022 |
| | Poorly Differentiated Lung | | |
| | Adenocarcinoma | | |
| HIPA, HIPB, HIPC | Lung, Cancer (4005163 B7): Invasive, | pSPORT1 | LP022 |
| | Poorly Diff. Adenocarcinoma, | | |
| | Metastatic | | |
| HOOH, HOOI | Ovary, Cancer: (4004562 B6) Papillary | pSPORT1 | LP022 |
| | Serous Cystic Neoplasm, Low | | |
| | Malignant Pot | | |
| HIDA | Lung, Normal: (4005313 B1) | pSPORT1 | LP022 |
| HUJA, HUJB, HUJC, HUFD, HUJE | B-Cells | pCMVSport 3.0 | LP022 |
| HNOA, HNOB, HNOC, HNOD | Ovary, Normal: (9805C040R) | pSPORT1 | LP022 |
| HNLM | Lung, Normal: (4005313 B1) | pSPORT1 | LP022 |
| HSCL | Stromal Cells | pSPORT1 | LP022 |
| HAAX | Lung, Cancer: (4005313 A3) Invasive | pSPORT1 | LP022 |
| | Poorly-differentiated Metastatic lung | | |
| | adenocarcinoma | | |
| HUUA, HUUB, HUUC, HUUD | B-cells (unstimulated) | pTrip1Ex2 | LP022 |
| HWWA, HWWB, HWWC, HWWD, | B-cells (stimulated) | pSPORT1 | LP022 |
| HWWE, HWWF, HWWG | | | |
| HCCC | Colon, Cancer: (9808C064R) | pCMVSport 3.0 | LP023 |
| HPDO HPDP HPDQ HPDR HPD | Ovary, Cancer (9809C332): Poorly | pSport 1 | LP023 |
| | differentiated adenocarcinoma | | |
| HPCO HPCP HPCQ HPCT | Ovary, Cancer (15395A1F): Grade II | pSport 1 | LP023 |
| | Papillary Carcinoma | | |
| HOCM HOCO HOCP HOCQ | Ovary, Cancer: (15799A1F) Poorly | pSport 1 | LP023 |
| | differentiated carcinoma | | |
| HCBM HCBN HCBO | Breast, Cancer: (4004943 A5) | pSport 1 | LP023 |
| HNBT HNBU HNBV | Breast, Normal: (4005522B2) | pSport 1 | LP023 |
| HBCP HBCQ | Breast, Cancer: (4005522 A2) | pSport 1 | LP023 |
| HBCJ | Breast, Cancer: (9806C012R) | pSport 1 | LP023 |
| HSAM HSAN | Stromal cells 3.88 | pSport 1 | LP023 |
| HVCA HVCB HVCC HVCD | Ovary, Cancer: (4004332 A2) | pSport 1 | LP023 |
| HSCK HSEN HSEO | Stromal cells (HBM3.18) | pSport 1 | LP023 |
| HSCP HSCQ | stromal cell clone 2.5 | pSport 1 | LP023 |
| HUXA | Breast Cancer: (4005385 A2) | pSport 1 | LP023 |
| HCOM HCON HCOO HCOP HCOQ | Ovary, Cancer (4004650 A3): Well- | pSport 1 | LP023 |
| | Differentitated Micropapillary Serous | | |
| | Carcinoma | | |
| HBNM | Breast, Cancer: (9802C020E) | pSport 1 | LP023 |
| HVVA HVVB HVVC HVVD HVVE | Human Bone Marrow, treated | pSport 1 | LP023 |

[0851] Two approaches can be used to isolate a particular clone from the deposited sample of plasmid DNAs cited for that clone in Table 5. First, a plasmid is directly isolated by screening the clones using a polynucleotide probe corresponding to the nucleotide sequence of SEQ ID NO:X.

[0852] Particularly, a specific polynucleotide with 30-40 nucleotides is synthesized using an Applied Biosystems DNA synthesizer according to the sequence reported. The oligonucleotide is labeled, for instance, with 32P-γ-ATP using T4 polynucleotide kinase and purified according to routine methods. (E.g., Maniatis et al., Molecular Cloning: A Laboratory Manual, Cold Spring Harbor Press, Cold Spring, N.Y. (1982).) The plasmid mixture is transformed into a suitable host, as indicated above (such as XL-1 Blue (Stratagene)) using techniques known to those of skill in the art, such as those provided by the vector supplier or in related publications or patents cited above. The transformants are plated on 1.5% agar plates (containing the appropriate selection agent, e.g., ampicillin) to a density of about 150 transformants (colonies) per plate. These plates are screened using Nylon membranes according to routine methods for bacterial colony screening (e.g., Sambrook et al., Molecular Cloning: A Laboratory Manual, 2nd Edit., (1989), Cold Spring Harbor Laboratory Press, pages 1.93 to 1.104), or other techniques known to those of skill in the art.

[0853] Alternatively, two primers of 17-20 nucleotides derived from both ends of the nucleotide sequence of SEQ ID NO:X are synthesized and used to amplify the desired cDNA using the deposited cDNA plasmid as a template. The polymerase chain reaction is carried out under routine conditions, for instance, in 25 μl of reaction mixture with 0.5 ug of the above cDNA template. A convenient reaction mixture is 1.5-5 mM MgCl₂, 0.01% (w/v) gelatin, 20 μM each of dATP, dCTP, dGTP, dTTP, 25 pmol of each primer and 0.25 Unit of Taq polymerase. Thirty five cycles of PCR (denaturation at 94° C. for 1 min; annealing at 55° C. for 1 min; elongation at 72° C. for 1 min) are performed with a Perkin-Elmer Cetus automated thermal cycler. The amplified product is analyzed by agarose gel electrophoresis and the DNA band with expected molecular weight is excised and purified. The PCR product is verified to be the selected sequence by subcloning and sequencing the DNA product.

[0854] Several methods are available for the identification of the 5′ or 3′ non-coding portions of a gene which may not be present in the deposited clone. These methods include but are not limited to, filter probing, clone enrichment using specific probes, and protocols similar or identical to 5′ and 3′ “RACE” protocols which are well known in the art. For instance, a method similar to 5′ RACE is available for generating the missing 5′ end of a desired full-length transcript. (Fromont-Racine et al., Nucleic Acids Res. 21(7):1683-1684 (1993).)

[0855] Briefly, a specific RNA oligonucleotide is ligated to the 5′ ends of a population of RNA presumably containing full-length gene RNA transcripts. A primer set containing a primer specific to the ligated RNA oligonucleotide and a primer specific to a known sequence of the gene of interest is used to PCR amplify the 5′ portion of the desired full-length gene. This amplified product may then be sequenced and used to generate the full length gene.

[0856] This above method starts with total RNA isolated from the desired source, although poly-A+ RNA can be used. The RNA preparation can then be treated with phosphatase if necessary to eliminate 5′ phosphate groups on degraded or damaged RNA which may interfere with the later RNA ligase step. The phosphatase should then be inactivated and the RNA treated with tobacco acid pyrophosphatase in order to remove the cap structure present at the 5′ ends of messenger RNAs. This reaction leaves a 5′ phosphate group at the 5′ end of the cap cleaved RNA which can then be ligated to an RNA oligonucleotide using T4 RNA ligase.

[0857] This modified RNA preparation is used as a template for first strand cDNA synthesis using a gene specific oligonucleotide. The first strand synthesis reaction is used as a template for PCR amplification of the desired 5′ end using a primer specific to the ligated RNA oligonucleotide and a primer specific to the known sequence of the gene of interest. The resultant product is then sequenced and analyzed to confirm that the 5′ end sequence belongs to the desired gene.

### Example 2

### Isolation of Genomic Clones Corresponding to a Polynucleotide

[0858] A human genomic P1 library (Genomic Systems, Inc.) is screened by PCR using primers selected for the sequence corresponding to SEQ ID NO:X, according to the method described in Example 1. (See also, Sambrook.)

### Example 3

### Tissue Specific Expression Analysis

[0859] The Human Genome Sciences, Inc. (HGS) database is derived from sequencing tissue specific cDNA libraries. Libraries generated from a particular tissue are selected and the specific tissue expression pattern of EST groups or assembled contigs within these libraries is determined by comparison of the expression patterns of those groups or contigs within the entire database. ESTs which show tissue specific expression are selected.

[0860] The original clone from which the specific EST sequence was generated, is obtained from the catalogued library of clones and the insert amplified by PCR using methods known in the art. The PCR product is denatured then transferred in 96 well format to a nylon membrane (Schleicher and Scheull) generating an array filter of tissue specific clones. Housekeeping genes, maize genes, and known tissue specific genes are included on the filters. These targets can be used in signal normalization and to validate assay sensitivity. Additional targets are included to monitor probe length and specificity of hybridization.

[0861] Radioactively labeled hybridization probes are generated by first strand cDNA synthesis per the manufacturer's instructions (Life Technologies) from mRNA/RNA samples prepared from the specific tissue being analyzed. The hybridization probes are purified by gel exclusion chromatography, quantitated, and hybridized with the array filters in hybridization bottles at 65° C. overnight. The filters are washed under stringent conditions and signals are captured using a Fuji phosphorimager.

[0862] Data is extracted using AIS software and following background subtraction, signal normalization is performed. This includes a normalization of filter-wide expression levels between different experimental runs. Genes that are differentially expressed in the tissue of interest are identified and the full length sequence of these clones is generated.

### Example 4

### Chromosomal Mapping of the Polynucleotides

[0863] An oligonucleotide primer set is designed according to the sequence at the 5′ end of SEQ ID NO:X. This primer preferably spans about 100 nucleotides. This primer set is then used in a polymerase chain reaction under the following set of conditions: 30 seconds, 95° C.; 1 minute, 56° C.; 1 minute, 70° C. This cycle is repeated 32 times followed by one 5 minute cycle at 70° C. Human, mouse, and hamster DNA is used as template in addition to a somatic cell hybrid panel containing individual chromosomes or chromosome fragments (Bios, Inc). The reactions is analyzed on either 8% polyacrylamide gels or 3.5% agarose gels. Chromosome mapping is determined by the presence of an approximately 100 bp PCR fragment in the particular somatic cell hybrid.

### Example 5

### Bacterial Expression of a Polypeptide

[0864] A polynucleotide encoding a polypeptide of the present invention is amplified using PCR oligonucleotide primers corresponding to the 5′ and 3′ ends of the DNA sequence, as outlined in Example 1, to synthesize insertion fragments. The primers used to amplify the cDNA insert should preferably contain restriction sites, such as BamHI and XbaI, at the 5′ end of the primers in order to clone the amplified product into the expression vector. For example, BamHI and XbaI correspond to the restriction enzyme sites on the bacterial expression vector pQE-9. (Qiagen, Inc., Chatsworth, Calif.). This plasmid vector encodes antibiotic resistance (Amp^{r}), a bacterial origin of replication (ori), an IPTG-regulatable promoter/operator (P/O), a ribosome binding site (RBS), a 6-histidine tag (6-His), and restriction enzyme cloning sites.

[0865] The pQE-9 vector is digested with BamHI and XbaI and the amplified fragment is ligated into the pQE-9 vector maintaining the reading frame initiated at the bacterial RBS. The ligation mixture is then used to transform the E. coli strain M15/rep4 (Qiagen, Inc.) which contains multiple copies of the plasmid pREP4, which expresses the lacI repressor and also confers kanamycin resistance (Kan^{r}). Transformants are identified by their ability to grow on LB plates and ampicillin/kanamycin resistant colonies are selected. Plasmid DNA is isolated and confirmed by restriction analysis.

[0866] Clones containing the desired constructs are grown overnight (O/N) in liquid culture in LB media supplemented with both Amp (100 ug/ml) and Kan (25 ug/ml). The O/N culture is used to inoculate a large culture at a ratio of 1:100 to 1:250. The cells are grown to an optical density 600 (O.D.⁶⁰⁰) of between 0.4 and 0.6. IPTG (Isopropyl-B-D-thiogalacto pyranoside) is then added to a final concentration of 1 mM. IPTG induces by inactivating the lacI repressor, clearing the P/O leading to increased gene expression.

[0867] Cells are grown for an extra 3 to 4 hours. Cells are then harvested by centrifugation (20 mins at 6000× g). The cell pellet is solubilized in the chaotropic agent 6 Molar Guanidine HCl by stirring for 3-4 hours at 4° C. The cell debris is removed by centrifugation, and the supernatant containing the polypeptide is loaded onto a nickel-nitrilo-tri-acetic acid (“Ni-NTA”) affinity resin column (available from QIAGEN, Inc., supra). Proteins with a 6× His tag bind to the Ni-NTA resin with high affinity and can be purified in a simple one-step procedure (for details see: The QIAexpressionist (1995) QIAGEN, Inc., supra).

[0868] Briefly, the supernatant is loaded onto the column in 6 M guanidine-HCl, pH 8, the column is first washed with 10 volumes of 6 M guanidine-HCl, pH 8, then washed with 10 volumes of 6 M guanidine-HCl pH 6, and finally the polypeptide is eluted with 6 M guanidine-HCl, pH 5.

[0869] The purified protein is then renatured by dialyzing it against phosphate-buffered saline (PBS) or 50 mM Na-acetate, pH 6 buffer plus 200 mM NaCl. Alternatively, the protein can be successfully refolded while immobilized on the Ni-NTA column. The recommended conditions are as follows: renature using a linear 6M-1M urea gradient in 500 mM NaCl, 20% glycerol, 20 mM Tris/HCl pH 7.4, containing protease inhibitors. The renaturation should be performed over a period of 1.5 hours or more. After renaturation the proteins are eluted by the addition of 250 mM immidazole. Imidazole is removed by a final dialyzing step against PBS or 50 mM sodium acetate pH 6 buffer plus 200 mM NaCl. The purified protein is stored at 4° C. or frozen at -80° C.

[0870] In addition to the above expression vector, the present invention further includes an expression vector comprising phage operator and promoter elements operatively linked to a polynucleotide of the present invention, called pHE4a. (ATCC Accession Number 209645, deposited on Feb. 25, 1998.) This vector contains: 1) a neomycinphosphotransferase gene as a selection marker, 2) an E. coli origin of replication, 3) a T5 phage promoter sequence, 4) two lac operator sequences, 5) a Shine-Delgarno sequence, and 6) the lactose operon repressor gene (laclq). The origin of replication (oriC) is derived from pUC19 (LTI, Gaithersburg, Md.). The promoter sequence and operator sequences are made synthetically.

[0871] DNA can be inserted into the pHEa by restricting the vector with Ndel and XbaI, BamHI, XhoI, or Asp718, running the restricted product on a gel, and isolating the larger fragment (the stuffer fragment should be about 310 base pairs). The DNA insert is generated according to the PCR protocol described in Example 1, using PCR primers having restriction sites for NdeI (5′ primer) and XbaI, BamHI, XhoI, or Asp718 (3′ primer). The PCR insert is gel purified and restricted with compatible enzymes. The insert and vector are ligated according to standard protocols.

[0872] The engineered vector could easily be substituted in the above protocol to express protein in a bacterial system.

### Example 6

### Purification of a Polypeptide from an Inclusion Body

[0873] The following alternative method can be used to purify a polypeptide expressed in E coli when it is present in the form of inclusion bodies. Unless otherwise specified, all of the following steps are conducted at 4-10° C.

[0874] Upon completion of the production phase of the E. coli fermentation, the cell culture is cooled to 4-10° C. and the cells harvested by continuous centrifugation at 15,000 rpm (Heraeus Sepatech). On the basis of the expected yield of protein per unit weight of cell paste and the amount of purified protein required, an appropriate amount of cell paste, by weight, is suspended in a buffer solution containing 100 mM Tris, 50 mM EDTA, pH 7.4. The cells are dispersed to a homogeneous suspension using a high shear mixer.

[0875] The cells are then lysed by passing the solution through a microfluidizer (Microfuidics, Corp. or APV Gaulin, Inc.) twice at 4000-6000 psi. The homogenate is then mixed with NaCl solution to a final concentration of 0.5 M NaCl, followed by centrifugation at 7000 ×g for 15 min. The resultant pellet is washed again using 0.5M NaCl, 100 mM Tris, 50 mM EDTA, pH 7.4.

[0876] The resulting washed inclusion bodies are solubilized with 1.5 M guanidine hydrochloride (GuHCl) for 2-4 hours. After 7000 ×g centrifugation for 15 min., the pellet is discarded and the polypeptide containing supernatant is incubated at 4° C. overnight to allow further GuHCl extraction.

[0877] Following high speed centrifugation (30,000 ×g) to remove insoluble particles, the GuHCl solubilized protein is refolded by quickly mixing the GuHCl extract with 20 volumes of buffer containing 50 mM sodium, pH 4.5, 150 mM NaCl, 2 mM EDTA by vigorous stirring. The refolded diluted protein solution is kept at 4° C. without mixing for 12 hours prior to further purification steps.

[0878] To clarify the refolded polypeptide solution, a previously prepared tangential filtration unit equipped with 0.16 μm membrane filter with appropriate surface area (e.g., Filtron), equilibrated with 40 mM sodium acetate, pH 6.0 is employed. The filtered sample is loaded onto a cation exchange resin (e.g., Poros HS-50, Perseptive Biosystems). The column is washed with 40 mM sodium acetate, pH 6.0 and eluted with 250 mM, 500 mM, 1000 mM, and 1500 mM NaCl in the same buffer, in a stepwise manner. The absorbance at 280 nm of the effluent is continuously monitored. Fractions are collected and further analyzed by SDS-PAGE.

[0879] Fractions containing the polypeptide are then pooled and mixed with 4 volumes of water. The diluted sample is then loaded onto a previously prepared set of tandem columns of strong anion (Poros HQ-50, Perseptive Biosystems) and weak anion (Poros CM-20, Perseptive Biosystems) exchange resins. The columns are equilibrated with 40 mM sodium acetate, pH 6.0. Both columns are washed with 40 mM sodium acetate, pH 6.0, 200 mM NaCl. The CM-20 column is then eluted using a 10 column volume linear gradient ranging from 0.2 M NaCl, 50 mM sodium acetate, pH 6.0 to 1.0 M NaCl, 50 mM sodium acetate, pH 6.5. Fractions are collected under constant A₂₈₀ monitoring of the effluent. Fractions containing the polypeptide (determined, for instance, by 16% SDS-PAGE) are then pooled.

[0880] The resultant polypeptide should exhibit greater than 95% purity after the above refolding and purification steps. No major contaminant bands should be observed from Commassie blue stained 16% SDS-PAGE gel when 5 μg of purified protein is loaded. The purified protein can also be tested for endotoxin/LPS contamination, and typically the LPS content is less than 0.1 ng/ml according to LAL assays.

### Example 7

### Cloning and Expression of a Polypeptide in a Baculovirus Expression System

[0881] In this example, the plasmid shuttle vector pA2 is used to insert a polynucleotide into a baculovirus to express a polypeptide. This expression vector contains the strong polyhedrin promoter of the Autographa californica nuclear polyhedrosis virus (AcMNPV) followed by convenient restriction sites such as BamHI, Xba I and Asp718. The polyadenylation site of the simian virus 40 (“SV40”) is used for efficient polyadenylation. For easy selection of recombinant virus, the plasmid contains the beta-galactosidase gene from E. coli under control of a weak Drosophila promoter in the same orientation, followed by the polyadenylation signal of the polyhedrin gene. The inserted genes are flanked on both sides by viral sequences for cell-mediated homologous recombination with wild-type viral DNA to generate a viable virus that express the cloned polynucleotide.

[0882] Many other baculovirus vectors can be used in place of the vector above, such as pAc373, pVL941, and pAcIM1, as one skilled in the art would readily appreciate, as long as the construct provides appropriately located signals for transcription, translation, secretion and the like, including a signal peptide and an in-frame AUG as required. Such vectors are described, for instance, in Luckow et al., Virology 170:31-39 (1989).

[0883] Specifically, the cDNA sequence contained in the deposited clone, including the AUG initiation codon, is amplified using the PCR protocol described in Example 1. If a naturally occurring signal sequence is used to produce the polypeptide of the present invention, the pA2 vector does not need a second signal peptide. Alternatively, the vector can be modified (pA2 GP) to include a baculovirus leader sequence, using the standard methods described in Summers et al., “A Manual of Methods for Baculovirus Vectors and Insect Cell Culture Procedures,” Texas Agricultural Experimental Station Bulletin No. 1555 (1987).

[0884] The amplified fragment is isolated from a 1% agarose gel using a commercially available kit (“Geneclean,” BIO 101 Inc., La Jolla, Ca.). The fragment then is digested with appropriate restriction enzymes and again purified on a 1% agarose gel.

[0885] The plasmid is digested with the corresponding restriction enzymes and optionally, can be dephosphorylated using calf intestinal phosphatase, using routine procedures known in the art. The DNA is then isolated from a 1% agarose gel using a commercially available kit (“Geneclean” BIO 101 Inc., La Jolla, Calif.).

[0886] The fragment and the dephosphorylated plasmid are ligated together with T4 DNA ligase. E. coli HB101 or other suitable E. coli hosts such as XL-1 Blue (Stratagene Cloning Systems, La Jolla, Calif., ) cells are transformed with the ligation mixture and spread on culture plates. Bacteria containing the plasmid are identified by digesting DNA from individual colonies and analyzing the digestion product by gel electrophoresis. The sequence of the cloned fragment is confirmed by DNA sequencing.

[0887] Five μg of a plasmid containing the polynucleotide is co-transfected with 1.0 μg of a commercially available linearized baculovirus DNA (“BaculoGold™ baculovirus DNA”, Pharmingen, San Diego, Calif.), using the lipofection method described by Felgner et al., Proc. Natl. Acad. Sci. USA 84:7413-7417 (1987). One μg of BaculoGold™ virus DNA and 5 μg of the plasmid are mixed in a sterile well of a microtiter plate containing 50 μl of serum-free Grace's medium (Life Technologies Inc., Gaithersburg, MD). Afterwards, 10 μl Lipofectin plus 90 μl Grace's medium are added, mixed and incubated for 15 minutes at room temperature. Then the transfection mixture is added drop-wise to Sf9 insect cells (ATCC CRL 1711) seeded in a 35 mm tissue culture plate with 1 ml Grace's medium without serum. The plate is then incubated for 5 hours at 27° C. The transfection solution is then removed from the plate and 1 ml of Grace's insect medium supplemented with 10% fetal calf serum is added. Cultivation is then continued at 27° C. for four days.

[0888] After four days the supernatant is collected and a plaque assay is performed, as described by Summers and Smith, supra. An agarose gel with “Blue Gal” (Life Technologies Inc., Gaithersburg) is used to allow easy identification and isolation of gal-expressing clones, which produce blue-stained plaques. (A detailed description of a “plaque assay” of this type can also be found in the user's guide for insect cell culture and baculovirology distributed by Life Technologies Inc., Gaithersburg, page 9-10.) After appropriate incubation, blue stained plaques are picked with the tip of a micropipettor (e.g., Eppendorf). The agar containing the recombinant viruses is then resuspended in a microcentrifuge tube containing 200 μl of Grace's medium and the suspension containing the recombinant baculovirus is used to infect Sf9 cells seeded in 35 mm dishes. Four days later the supernatants of these culture dishes are harvested and then they are stored at 4° C.

[0889] To verify the expression of the polypeptide, Sf9 cells are grown in Grace's medium supplemented with 10% heat-inactivated FBS. The cells are infected with the recombinant baculovirus containing the polynucleotide at a multiplicity of infection (“MOI”) of about 2. If radiolabeled proteins are desired, 6 hours later the medium is removed and is replaced with SF900 II medium minus methionine and cysteine (available from Life Technologies Inc., Rockville, Md.). After 42 hours, 5 ’SCi of ³⁵S-methionine and 5 μCi ³⁵-cysteine (available from Amersham) are added. The cells are further incubated for 16 hours and then are harvested by centrifugation. The proteins in the supernatant as well as the intracellular proteins are analyzed by SDS-PAGE followed by autoradiography (if radiolabeled).

[0890] Microsequencing of the amino acid sequence of the amino terminus of purified protein may be used to determine the amino terminal sequence of the produced protein.

### Example 8

### Expression of a Polypeptide in Mammalian Cells

[0891] The polypeptide of the present invention can be expressed in a mammalian cell. A typical mammalian expression vector contains a promoter element, which mediates the initiation of transcription of mRNA, a protein coding sequence, and signals required for the termination of transcription and polyadenylation of the transcript. Additional elements include enhancers, Kozak sequences and intervening sequences flanked by donor and acceptor sites for RNA splicing. Highly efficient transcription is achieved with the early and late promoters from SV40, the long terminal repeats (LTRs) from Retroviruses, e.g., RSV, HTLVI, HIVI and the early promoter of the cytomegalovirus (CMV). However, cellular elements can also be used (e.g., the human actin promoter).

[0892] Suitable expression vectors for use in practicing the present invention include, for example, vectors such as pSVL and pMSG (Pharmacia, Uppsala, Sweden), pRSVcat (ATCC 37152), pSV2dhfr (ATCC 37146), pBC12MI (ATCC 67109), pCMVSport 2.0, and pCMVSport 3.0. Mammalian host cells that could be used include, human Hela, 293, H9 and Jurkat cells, mouse NIH3T3 and C127 cells, Cos 1, Cos 7 and CV1, quail QC1-3 cells, mouse L cells and Chinese hamster ovary (CHO) cells.

[0893] Alternatively, the polypeptide can be expressed in stable cell lines containing the polynucleotide integrated into a chromosome. The co-transfection with a selectable marker such as DHFR, gpt, neomycin, hygromycin allows the identification and isolation of the transfected cells.

[0894] The transfected gene can also be amplified to express large amounts of the encoded protein. The DHFR (dihydrofolate reductase) marker is useful in developing cell lines that carry several hundred or even several thousand copies of the gene of interest. (See, e.g., Alt, F. W., et al., J. Biol. Chem. 253:1357-1370 (1978); Hamlin, J. L. and Ma, C., Biochem. et Biophys. Acta, 1097:107-143 (1990); Page, M. J. and Sydenham, M. A., Biotechnology 9:64-68 (1991).) Another useful selection marker is the enzyme glutamine synthase (GS) (Murphy et al., Biochem J. 227:277-279 (1991); Bebbington et al., Bio/Technology 10:169-175 (1992). Using these markers, the mammalian cells are grown in selective medium and the cells with the highest resistance are selected. These cell lines contain the amplified gene(s) integrated into a chromosome. Chinese hamster ovary (CHO) and NSO cells are often used for the production of proteins.

[0895] Derivatives of the plasmid pSV2-dhfr (ATCC Accession No. 37146), the expression vectors pC4 (ATCC Accession No. 209646) and pC6 (ATCC Accession No.209647) contain the strong promoter (LTR) of the Rous Sarcoma Virus (Cullen et al., Molecular and Cellular Biology, 438-447 (March, 1985)) plus a fragment of the CMV-enhancer (Boshart et al., Cell 41:521-530 (1985).) Multiple cloning sites, e.g., with the restriction enzyme cleavage sites BamHI, XbaI and Asp718, facilitate the cloning of the gene of interest. The vectors also contain the 3′ intron, the polyadenylation and termination signal of the rat preproinsulin gene, and the mouse DHFR gene under control of the SV40 early promoter.

[0896] Specifically, the plasmid pC6, for example, is digested with appropriate restriction enzymes and then dephosphorylated using calf intestinal phosphates by procedures known in the art. The vector is then isolated from a 1% agarose gel.

[0897] A polynucleotide of the present invention is amplified according to the protocol outlined in Example 1. If a naturally occurring signal sequence is used to produce the polypeptide of the present invention, the vector does not need a second signal peptide. Alternatively, if a naturally occurring signal sequence is not used, the vector can be modified to include a heterologous signal sequence. (See, e.g., WO 96/34891.)

[0898] The amplified fragment is isolated from a 1% agarose gel using a commercially available kit (“Geneclean,” BIO 101 Inc., La Jolla, Calif.). The fragment then is digested with appropriate restriction enzymes and again purified on a 1% agarose gel.

[0899] The amplified fragment is then digested with the same restriction enzyme and purified on a 1% agarose gel. The isolated fragment and the dephosphorylated vector are then ligated with T4 DNA ligase. E. coli HB101 or XL-1 Blue cells are then transformed and bacteria are identified that contain the fragment inserted into plasmid pC6 using, for instance, restriction enzyme analysis.

[0900] Chinese hamster ovary cells lacking an active DHFR gene is used for transfection. Five μg of the expression plasmid pC6 or pC4 is cotransfected with 0.5 μg of the plasmid pSVneo using lipofectin (Felgner et al., supra). The plasmid pSV2-neo contains a dominant selectable marker, the neo gene from Tn5 encoding an enzyme that confers resistance to a group of antibiotics including G418. The cells are seeded in alpha minus MEM supplemented with 1 mg/ml G418. After 2 days, the cells are trypsinized and seeded in hybridoma cloning plates (Greiner, Germany) in alpha minus MEM supplemented with 10, 25, or 50 ng/ml of metothrexate plus 1 mg/ml G418. After about 10-14 days single clones are trypsinized and then seeded in 6-well petri dishes or 10 ml flasks using different concentrations of methotrexate (50 nM, 100 nM, 200 nM, 400 nM, 800 nM). Clones growing at the highest concentrations of methotrexate are then transferred to new 6-well plates containing even higher concentrations of methotrexate (1 μM, 2 AM, 5 μM, 10 mM, 20 mM). The same procedure is repeated until clones are obtained which grow at a concentration of 100-200 μM. Expression of the desired gene product is analyzed, for instance, by SDS-PAGE and Western blot or by reversed phase HPLC analysis.

### Example 9

### Protein Fusions

[0901] The polypeptides of the present invention are preferably fused to other proteins. These fusion proteins can be used for a variety of applications. For example, fusion of the present polypeptides to His-tag, HA-tag, protein A, IgG domains, and maltose binding protein facilitates purification. (See Example 5; see also EP A 394,827; Traunecker, et al., Nature 331:84-86 (1988).) Similarly, fusion to IgG-1, IgG-3, and albumin increases the halflife time in vivo. Nuclear localization signals fused to the polypeptides of the present invention can target the protein to a specific subcellular localization, while covalent heterodimer or homodimers can increase or decrease the activity of a fusion protein. Fusion proteins can also create chimeric molecules having more than one function. Finally, fusion proteins can increase solubility and/or stability of the fused protein compared to the non-fused protein. All of the types of fusion proteins described above can be made by modifying the following protocol, which outlines the fusion of a polypeptide to an IgG molecule, or the protocol described in Example 5.

[0902] Briefly, the human Fc portion of the IgG molecule can be PCR amplified, using primers that span the 5′ and 3′ ends of the sequence described below. These primers also should have convenient restriction enzyme sites that will facilitate cloning into an expression vector, preferably a mammalian expression vector.

[0903] For example, if pC4 (Accession No. 209646) is used, the human Fc portion can be ligated into the BamHI cloning site. Note that the 3′ BamHI site should be destroyed. Next, the vector containing the human Fc portion is re-restricted with BamHI, linearizing the vector, and a polynucleotide of the present invention, isolated by the PCR protocol described in Example 1, is ligated into this BamHI site. Note that the polynucleotide is cloned without a stop codon, otherwise a fusion protein will not be produced.

[0904] If the naturally occurring signal sequence is used to produce the polypeptide of the present invention, pC4 does not need a second signal peptide. Alternatively, if the naturally occurring signal sequence is not used, the vector can be modified to include a heterologous signal sequence. (See, e.g., WO 96/34891.)

[0905] Human IgG Fc region:

[0906] GGGATCCGGAGCCCAAATCTTCTGACAAAACTCACACATGCCCACCGTGCCCA GCACCTGAATTCGAGGGTGCACCGTCAGTCTTCCTCTTCCCCCCAAAACCCAA GGACACCCTCATGATCTCCCGGACTCCTGAGGTCACATGCGTGGTGGTGGACG TAAGCCACGAAGACCCTGAGGTCAAGTTCAACTGGTACGTGGACGGCGTGGA GGTGCATAATGCCAAGACAAAGCCGCGGGAGGAGCAGTACAACAGCACGTAC CGTGTGGTCAGCGTCCTCACCGTCCTGCACCAGGACTGGCTGAATGGCAAGGA GTACAAGTGCAAGGTCTCCAACAAAGCCCTCCCAACCCCCATCGAGAAAACC ATCTCCAAAGCCAAAGGGCAGCCCCGAGAACCACAGGTGTACACCCTGCCCC CATCCCGGGATGAGCTGACCAAGAACCAGGTCAGCCTGACCTGCCTGGTCAA AGGCTTCTATCCAAGCGACATCGCCGTGGAGTGGGAGAGCAATGGGCAGCCG GAGAACAACTACAAGACCACGCCTCCCGTGCTGGACTCCGACGGCTCCTTCTT CCTCTACAGCAAGCTCACCGTGGACAAGAGCAGGTGGCAGCAGGGGAACGTC TTCTCATGCTCCGTGATGCATGAGGCTCTGCACAACCACTACACGCAGAAGAG CCTCTCCCTGTCTCCGGGTAAATGAGTGCGACGGCCGCGACTCTAGAGGAT

[0907] (SEQ ID NO:837)

### Example 10

### Production of an Antibody from a Polypeptide

[0908] a) Hybridoma Technology

[0909] The antibodies of the present invention can be prepared by a variety of methods. (See, Current Protocols, Chapter 2.) As one example of such methods, cells expressing polypeptide of the present invention are administered to an animal to induce the production of sera containing polyclonal antibodies. In a preferred method, a preparation of polypeptide of the present invention is prepared and purified to render it substantially free of natural contaminants. Such a preparation is then introduced into an animal in order to produce polyclonal antisera of greater specific activity.

[0910] Monoclonal antibodies specific for polypeptide of the present invention are prepared using hybridoma technology. (Kohler et al., Nature 256:495 (1975); Kohler et al., Eur. J. Immunol. 6:511 (1976); Kohler et al., Eur. J. Immunol. 6:292 (1976); Hammerling et al., in: Monoclonal Antibodies and T-Cell Hybridomas, Elsevier, N.Y., pp. 563-681 (1981)). In general, an animal (preferably a mouse) is immunized with polypeptide of the present invention or, more preferably, with a secreted polypeptide of the present invention-expressing cell. Such polypeptide-expressing cells are cultured in any suitable tissue culture medium, preferably in Earle's modified Eagle's medium supplemented with 10% fetal bovine serum (inactivated at about 56° C.), and supplemented with about 10 g/l of nonessential amino acids, about 1,000 U/ml of penicillin, and about 100 μg/ml of streptomycin.

[0911] The splenocytes of such mice are extracted and fused with a suitable myeloma cell line. Any suitable myeloma cell line may be employed in accordance with the present invention; however, it is preferable to employ the parent myeloma cell line (SP20), available from the ATCC. After fusion, the resulting hybridoma cells are selectively maintained in HAT medium, and then cloned by limiting dilution as described by Wands et al. (Gastroenterology 80:225-232 (1981)). The hybridoma cells obtained through such a selection are then assayed to identify clones which secrete antibodies capable of binding the polypeptide of the present invention.

[0912] Alternatively, additional antibodies capable of binding to polypeptide of the present invention can be produced in a two-step procedure using anti-idiotypic antibodies. Such a method makes use of the fact that antibodies are themselves antigens, and therefore, it is possible to obtain an antibody which binds to a second antibody. In accordance with this method, protein specific antibodies are used to immunize an animal, preferably a mouse. The splenocytes of such an animal are then used to produce hybridoma cells, and the hybridoma cells are screened to identify clones which produce an antibody whose ability to bind to the polypeptide of the present invention-specific antibody can be blocked by polypeptide of the present invention. Such antibodies comprise anti-idiotypic antibodies to the polypeptide of the present invention-specific antibody and are used to immunize an animal to induce formation of further polypeptide of the present invention-specific antibodies.

[0913] For in vivo use of antibodies in humans, an antibody is “humanized”. Such antibodies can be produced using genetic constructs derived from hybridoma cells producing the monoclonal antibodies described above. Methods for producing chimeric and humanized antibodies are known in the art and are discussed herein. (See, for review, Morrison, Science 229:1202 (1985); Oi et al., BioTechniques 4:214 (1986); Cabilly et al., U.S. Pat. No. 4,816,567; Taniguchi et al., EP 171496; Morrison et al., EP 173494; Neuberger et al., WO 8601533; Robinson et al., WO 8702671; Boulianne et al., Nature 312:643 (1984); Neuberger et al., Nature 314:268 (1985).)

[0914] b) Isolation Of Antibody Fragments Directed Against Polypeptide of the Present Invention From A Library Of scFvs

[0915] Naturally occurring V-genes isolated from human PBLs are constructed into a library of antibody fragments which contain reactivities against polypeptide of the present invention to which the donor may or may not have been exposed (see e.g., U.S. Pat. No. 5,885,793 incorporated herein by reference in its entirety).

[0916] Rescue of the Library. A library of scFvs is constructed from the RNA of human PBLs as described in PCT publication WO 92/01047. To rescue phage displaying antibody fragments, approximately 109 E. coli harboring the phagemid are used to inoculate 50 ml of 2xTY containing 1% glucose and 100 μg/ml of ampicillin (2xTY-AMP-GLU) and grown to an O.D. of 0.8 with shaking. Five ml of this culture is used to innoculate 50 ml of 2xTY-AMP-GLU, 2×108 TU of delta gene 3 helper (M13 delta gene III, see PCT publication WO 92/01047) are added and the culture incubated at 37° C. for 45 minutes without shaking and then at 37° C. for 45 minutes with shaking. The culture is centrifuged at 4000 r.p.m. for 10 min. and the pellet resuspended in 2 liters of 2xTY containing 100 μg/ml ampicillin and 50 ug/ml kanamycin and grown overnight. Phage are prepared as described in PCT publication WO 92/01047.

[0917] M13 delta gene III is prepared as follows: M13 delta gene III helper phage does not encode gene III protein, hence the phage(mid) displaying antibody fragments have a greater avidity of binding to antigen. Infectious M13 delta gene III particles are made by growing the helper phage in cells harboring a pUC19 derivative supplying the wild type gene III protein during phage morphogenesis. The culture is incubated for 1 hour at 37° C. without shaking and then for a further hour at 37° C. with shaking. Cells are spun down (IEC-Centra 8,400 r.p.m. for 10 min), resuspended in 300 ml 2xTY broth containing 100 μg ampicillin/ml and 25 μg kanamycin/ml (2xTY-AMP-KAN) and grown overnight, shaking at 37° C. Phage particles are purified and concentrated from the culture medium by two PEG-precipitations (Sambrook et al., 1990), resuspended in 2 ml PBS and passed through a 0.45 μm filter (Minisart NML; Sartorius) to give a final concentration of approximately 1013 transducing units/ml (ampicillin-resistant clones).

[0918] Panning of the Library.

[0919] Immunotubes (Nunc) are coated overnight in PBS with 4 ml of either 100 μg/ml or 10 μg/ml of a polypeptide of the present invention. Tubes are blocked with 2% Marvel-PBS for 2 hours at 37° C. and then washed 3 times in PBS. Approximately 1013 TU of phage is applied to the tube and incubated for 30 minutes at room temperature tumbling on an over and under turntable and then left to stand for another 1.5 hours. Tubes are washed 10 times with PBS 0.1% Tween-20 and 10 times with PBS. Phage are eluted by adding 1 ml of 100 mM triethylamine and rotating 15 minutes on an under and over turntable after which the solution is immediately neutralized with 0.5 ml of 1.0M Tris-HCl, pH 7.4. Phage are then used to infect 10 ml of mid-log E. coli TG1 by incubating eluted phage with bacteria for 30 minutes at 37° C. The E. coli are then plated on TYE plates containing 1% glucose and 100 μg/ml ampicillin. The resulting bacterial library is then rescued with delta gene 3 helper phage as described above to prepare phage for a subsequent round of selection. This process is then repeated for a total of 4 rounds of affinity purification with tube-washing increased to 20 times with PBS, 0.1% Tween-20 and 20 times with PBS for rounds 3 and 4.

[0920] Characterization of Binders. Eluted phage from the 3rd and 4th rounds of selection are used to infect E. coli HB 2151 and soluble scFv is produced (Marks, et al., 1991) from single colonies for assay. ELISAs are performed with microtitre plates coated with either 10 pg/ml of the polypeptide of the present invention in 50 mM bicarbonate pH 9.6. Clones positive in ELISA are further characterized by PCR fingerprinting (see, e.g., PCT publication WO 92/01047) and then by sequencing. These ELISA positive clones may also be further characterized by techniques known in the art, such as, for example, epitope mapping, binding affinity, receptor signal transduction, ability to block or competitively inhibit antibody/antigen binding, and competitive agonistic or antagonistic activity.

### Example 11

### Method of Determining Alterations in a Gene Corresponding to a Polynucleotide

[0921] RNA isolated from entire families or individual patients presenting with a phenotype of interest (such as a disease) is be isolated. cDNA is then generated from these RNA samples using protocols known in the art. (See, Sambrook.) The cDNA is then used as a template for PCR, employing primers surrounding regions of interest in SEQ ID NO:X; and/or the nucleotide sequence of the related cDNA in the cDNA clone contained in a deposited library. Suggested PCR conditions consist of 35 cycles at 95 degrees C for 30 seconds; 60-120 seconds at 52-58 degrees C; and 60-120 seconds at 70 degrees C, using buffer solutions described in Sidransky et al., Science 252:706 (1991).

[0922] PCR products are then sequenced using primers labeled at their 5′ end with T4 polynucleotide kinase, employing SequiTherm Polymerase. (Epicentre Technologies). The intron-exon borders of selected exons is also determined and genomic PCR products analyzed to confirm the results. PCR products harboring suspected mutations is then cloned and sequenced to validate the results of the direct sequencing.

[0923] PCR products is cloned into T-tailed vectors as described in Holton et al., Nucleic Acids Research, 19:1156 (1991) and sequenced with T7 polymerase (United States Biochemical). Affected individuals are identified by mutations not present in unaffected individuals.

[0924] Genomic rearrangements are also observed as a method of determining alterations in a gene corresponding to a polynucleotide. Genomic clones isolated according to Example 2 are nick-translated with digoxigenindeoxy-uridine 5′-triphosphate (Boehringer Manheim), and FISH performed as described in Johnson et al., Methods Cell Biol. 35:73-99 (1991). Hybridization with the labeled probe is carried out using a vast excess of human cot-1 DNA for specific hybridization to the corresponding genomic locus.

[0925] Chromosomes are counterstained with 4,6-diamino-2-phenylidole and propidium iodide, producing a combination of C- and R-bands. Aligned images for precise mapping are obtained using a triple-band filter set (Chroma Technology, Brattleboro, Vt.) in combination with a cooled charge-coupled device camera (Photometrics, Tucson, Ariz.) and variable excitation wavelength filters. (Johnson et al., Genet. Anal. Tech. Appl., 8:75 (1991).) Image collection, analysis and chromosomal fractional length measurements are performed using the ISee Graphical Program System. (Inovision Corporation, Durham, N.C.) Chromosome alterations of the genomic region hybridized by the probe are identified as insertions, deletions, and translocations. These alterations are used as a diagnostic marker for an associated disease.

### Example 12

### Method of Detecting Abnormal Levels of a Polypeptide in a Biological Sample

[0926] A polypeptide of the present invention can be detected in a biological sample, and if an increased or decreased level of the polypeptide is detected, this polypeptide is a marker for a particular phenotype. Methods of detection are numerous, and thus, it is understood that one skilled in the art can modify the following assay to fit their particular needs.

[0927] For example, antibody-sandwich ELISAs are used to detect polypeptides in a sample, preferably a biological sample. Wells of a microtiter plate are coated with specific antibodies, at a final concentration of 0.2 to 10 μg/ml. The antibodies are either monoclonal or polyclonal and are produced by the method described in Example 10. The wells are blocked so that non-specific binding of the polypeptide to the well is reduced.

[0928] The coated wells are then incubated for >2 hours at RT with a sample containing the polypeptide. Preferably, serial dilutions of the sample should be used to validate results. The plates are then washed three times with deionized or distilled water to remove unbounded polypeptide.

[0929] Next, 50 ul of specific antibody-alkaline phosphatase conjugate, at a concentration of 25-400 ng, is added and incubated for 2 hours at room temperature. The plates are again washed three times with deionized or distilled water to remove unbounded conjugate.

[0930] Add 75 ul of 4-methylumbelliferyl phosphate (MUP) or p-nitrophenyl phosphate (NPP) substrate solution to each well and incubate 1 hour at room temperature. Measure the reaction by a microtiter plate reader. Prepare a standard curve, using serial dilutions of a control sample, and plot polypeptide concentration on the X-axis (log scale) and fluorescence or absorbance of the Y-axis (linear scale). Interpolate the concentration of the polypeptide in the sample using the standard curve.

### Example 13

### Formulation

[0931] The invention also provides methods of treatment and/or prevention of diseases or disorders (such as, for example, any one or more of the diseases or disorders disclosed herein) by administration to a subject of an effective amount of a Therapeutic. By therapeutic is meant a polynucleotides or polypeptides of the invention (including fragments and variants), agonists or antagonists thereof, and/or antibodies thereto, in combination with a pharmaceutically acceptable carrier type (e.g., a sterile carrier).

[0932] The Therapeutic will be formulated and dosed in a fashion consistent with good medical practice, taking into account the clinical condition of the individual patient (especially the side effects of treatment with the Therapeutic alone), the site of delivery, the method of administration, the scheduling of administration, and other factors known to practitioners. The “effective amount” for purposes herein is thus determined by such considerations.

[0933] As a general proposition, the total pharmaceutically effective amount of the Therapeutic administered parenterally per dose will be in the range of about lug/kg/day to 10 mg/kg/day of patient body weight, although, as noted above, this will be subject to therapeutic discretion. More preferably, this dose is at least 0.01 mg/kg/day, and most preferably for humans between about 0.01 and 1 mg/kg/day for the hormone. If given continuously, the Therapeutic is typically administered at a dose rate of about 1 ug/kg/hour to about 50 ug/kg/hour, either by 1-4 injections per day or by continuous subcutaneous infusions, for example, using a mini-pump. An intravenous bag solution may also be employed. The length of treatment needed to observe changes and the interval following treatment for responses to occur appears to vary depending on the desired effect.

[0934] Therapeutics can be are administered orally, rectally, parenterally, intracistemally, intravaginally, intraperitoneally, topically (as by powders, ointments, gels, drops or transdermal patch), bucally, or as an oral or nasal spray. “Pharmaceutically acceptable carrier” refers to a non-toxic solid, semisolid or liquid filler, diluent, encapsulating material or formulation auxiliary of any. The term “parenteral” as used herein refers to modes of administration which include intravenous, intramuscular, intraperitoneal, intrasternal, subcutaneous and intraarticular injection and infusion.

[0935] Therapeutics of the invention are also suitably administered by sustained-release release systems. Suitable examples of sustained-release Therapeutics are administered orally, rectally, parenterally, intracistemally, intravaginally, intraperitoneally, topically (as by powders, ointments, gels, drops or transdermal patch), bucally, or as an oral or nasal spray. Pharmaceutically acceptable carrier” refers to a non-toxic solid, semisolid or liquid filler, diluent, encapsulating material or formulation auxiliary of any type. The term “parenteral” as used herein refers to modes of administration which include intravenous, intramuscular, intraperitoneal, intrasternal, subcutaneous and intraarticular injection and infusion.

[0936] Therapeutics of the invention are also suitably administered by sustained-release systems. Suitable examples of sustained-release Therapeutics include suitable polymeric materials (such as, for example, semi-permeable polymer matrices in the form of shaped articles, e.g., films, or mirocapsules), suitable hydrophobic materials (for example as an emulsion in an acceptable oil) or ion exchange resins, and sparingly soluble derivatives (such as, for example, a sparingly soluble salt).

[0937] Sustained-release matrices include polylactides (U.S. Pat. No. 3,773,919, EP 58,481), copolymers of L-glutamic acid and gamma-ethyl-L-glutamate (Sidman et al., Biopolymers 22:547-556 (1983)), poly (2-hydroxyethyl methacrylate) (Langer et al., J. Biomed. Mater. Res. 15:167-277 (1981), and Langer, Chem. Tech. 12:98-105 (1982)), ethylene vinyl acetate (Langer et al., Id.) or poly-D-(−)-3-hydroxybutyric acid (EP 133,988).

[0938] Sustained-release Therapeutics also include liposomally entrapped Therapeutics of the invention (see generally, Langer, Science 249:1527-1533 (1990); Treat et al., in Liposomes in the Therapy of Infectious Disease and Cancer, Lopez-Berestein and Fidler (eds.), Liss, New York, pp. 317-327 and 353-365 (1989)). Liposomes containing the Therapeutic are prepared by methods known per se: DE 3,218,121; Epstein et al., Proc. Natl. Acad. Sci. (USA) 82:3688-3692 (1985); Hwang et al., Proc. Natl. Acad. Sci.(USA) 77:4030-4034 (1980); EP 52,322; EP 36,676; EP 88,046; EP 143,949; EP 142,641; Japanese Pat. Appl. 83-118008; U.S. Pat. Nos. 4,485,045 and 4,544,545; and EP 102,324. Ordinarily, the liposomes are of the small (about 200-800 Angstroms) unilamellar type in which the lipid content is greater than about 30 mol. percent cholesterol, the selected proportion being adjusted for the optimal Therapeutic.

[0939] In yet an additional embodiment, the Therapeutics of the invention are delivered by way of a pump (see Langer, supra; Sefton, CRC Crit. Ref. Biomed. Eng. 14:201 (1987); Buchwald et al., Surgery 88:507 (1980); Saudek et al., N. Engl. J. Med. 321:574 (1989)).

[0940] Other controlled release systems are discussed in the review by Langer (Science 249:1527-1533 (1990)).

[0941] For parenteral administration, in one embodiment, the Therapeutic is formulated generally by mixing it at the desired degree of purity, in a unit dosage injectable form (solution, suspension, or emulsion), with a pharmaceutically acceptable carrier, i.e., one that is non-toxic to recipients at the dosages and concentrations employed and is compatible with other ingredients of the formulation. For example, the formulation preferably does not include oxidizing agents and other compounds that are known to be deleterious to the Therapeutic.

[0942] Generally, the formulations are prepared by contacting the Therapeutic uniformly and intimately with liquid carriers or finely divided solid carriers or both. Then, if necessary, the product is shaped into the desired formulation. Preferably the carrier is a parenteral carrier, more preferably a solution that is isotonic with the blood of the recipient. Examples of such carrier vehicles include water, saline, Ringer's solution, and dextrose solution. Non-aqueous vehicles such as fixed oils and ethyl oleate are also useful herein, as well as liposomes.

[0943] The carrier suitably contains minor amounts of additives such as substances that enhance isotonicity and chemical stability. Such materials are non-toxic to recipients at the dosages and concentrations employed, and include buffers such as phosphate, citrate, succinate, acetic acid, and other organic acids or their salts; antioxidants such as ascorbic acid; low molecular weight (less than about ten residues) polypeptides, e.g., polyarginine or tripeptides; proteins, such as serum albumin, gelatin, or immunoglobulins; hydrophilic polymers such as polyvinylpyrrolidone; amino acids, such as glycine, glutamic acid, aspartic acid, or arginine; monosaccharides, disaccharides, and other carbohydrates including cellulose or its derivatives, glucose, manose, or dextrins; chelating agents such as EDTA; sugar alcohols such as mannitol or sorbitol; counterions such as sodium; and/or nonionic surfactants such as polysorbates, poloxamers, or PEG.

[0944] The Therapeutic is typically formulated in such vehicles at a concentration of about 0.1 mg/ml to 100 mg/ml, preferably 1-10 mg/ml, at a pH of about 3 to 8. It will be understood that the use of certain of the foregoing excipients, carriers, or stabilizers will result in the formation of polypeptide salts.

[0945] Any pharmaceutical used for therapeutic administration can be sterile. Sterility is readily accomplished by filtration through sterile filtration membranes (e.g., 0.2 micron membranes). Therapeutics generally are placed into a container having a sterile access port, for example, an intravenous solution bag or vial having a stopper pierceable by a hypodermic injection needle.

[0946] Therapeutics ordinarily will be stored in unit or multi-dose containers, for example, sealed ampoules or vials, as an aqueous solution or as a lyophilized formulation for reconstitution. As an example of a lyophilized formulation, 10-ml vials are filled with 5 ml of sterile-filtered 1% (w/v) aqueous Therapeutic solution, and the resulting mixture is lyophilized. The infusion solution is prepared by reconstituting the lyophilized Therapeutic using bacteriostatic Water-for-Injection.

[0947] The invention also provides a pharmaceutical pack or kit comprising one or more containers filled with one or more of the ingredients of the Therapeutics of the invention. Associated with such container(s) can be a notice in the form prescribed by a governmental agency regulating the manufacture, use or sale of pharmaceuticals or biological products, which notice reflects approval by the agency of manufacture, use or sale for human administration. In addition, the Therapeutics may be employed in conjunction with other therapeutic compounds.

[0948] The Therapeutics of the invention may be administered alone or in combination with adjuvants. Adjuvants that may be administered with the Therapeutics of the invention include, but are not limited to, alum, alum plus deoxycholate (ImmunoAg), MTP-PE (Biocine Corp.), QS21 (Genentech, Inc.), BCG, and MPL. In a specific embodiment, Therapeutics of the invention are administered in combination with alum. In another specific embodiment, Therapeutics of the invention are administered in combination with QS-21. Further adjuvants that may be administered with the Therapeutics of the invention include, but are not limited to, Monophosphoryl lipid immunomodulator, AdjuVax 100a, QS-21, QS-18, CRL1005, Aluminum salts, MF-59, and Virosomal adjuvant technology. Vaccines that may be administered with the Therapeutics of the invention include, but are not limited to, vaccines directed toward protection against MMR (measles, mumps, rubella), polio, varicella, tetanus/diptheria, hepatitis A, hepatitis B, haemophilus influenzae B, whooping cough, pneumonia, influenza, Lyme's Disease, rotavirus, cholera, yellow fever, Japanese encephalitis, poliomyelitis, rabies, typhoid fever, and pertussis. Combinations may be administered either concomitantly, e.g., as an admixture, separately but simultaneously or concurrently; or sequentially. This includes presentations in which the combined agents are administered together as a therapeutic mixture, and also procedures in which the combined agents are administered separately but simultaneously, e.g., as through separate intravenous lines into the same individual. Administration “in combination” further includes the separate administration of one of the compounds or agents given first, followed by the second.

[0949] The Therapeutics of the invention may be administered alone or in combination with other therapeutic agents. Therapeutic agents that may be administered in combination with the Therapeutics of the invention, include but not limited to, other members of the TNF family, chemotherapeutic agents, antibiotics, steroidal and non-steroidal anti-inflammatories, conventional immunotherapeutic agents, cytokines and/or growth factors. Combinations may be administered either concomitantly, e.g., as an admixture, separately but simultaneously or concurrently; or sequentially. This includes presentations in which the combined agents are administered together as a therapeutic mixture, and also procedures in which the combined agents are administered separately but simultaneously, e.g., as through separate intravenous lines into the same individual. Administration “in combination” further includes the separate administration of one of the compounds or agents given first, followed by the second.

[0950] In one embodiment, the Therapeutics of the invention are administered in combination with members of the TNF family. TNF, TNF-related or TNF-like molecules that may be administered with the Therapeutics of the invention include, but are not limited to, soluble forms of TNF-alpha, lymphotoxin-alpha (LT-alpha, also known as TNF-beta), LT-beta (found in complex heterotrimer LT-alpha2-beta), OPGL, FasL, CD27L, CD30L, CD40L, 4-1BBL, DcR3, OX40L, TNF-gamma (International Publication No. WO 96/14328), AIM-I (International Publication No. WO 97/33899), endokine-alpha (International Publication No. WO 98/07880), TR6 (International Publication No. WO 98/30694), OPG, and neutrokine-alpha (International Publication No. WO 98/18921, OX40, and nerve growth factor (NGF), and soluble forms of Fas, CD30, CD27, CD40 and 4-IBB, TR2 (International Publication No. WO 96/34095), DR3 (International Publication No. WO 97/33904), DR4 (International Publication No. WO 98/32856), TR5 (International Publication No. WO 98/30693), TR6 (International Publication No. WO 98/30694), TR7 (International Publication No. WO 98/41629), TRANK, TR9 (International Publication No. WO 98/56892), TR10 (International Publication No. WO 98/54202), 312C2 (International Publication No. WO 98/06842), and TR12, and soluble forms CD 154, CD70, and CD153.

[0951] In certain embodiments, Therapeutics of the invention are administered in combination with antiretroviral agents, nucleoside reverse transcriptase inhibitors, non-nucleoside reverse transcriptase inhibitors, and/or protease inhibitors. Nucleoside reverse transcriptase inhibitors that may be administered in combination with the Therapeutics of the invention, include, but are not limited to, RETROVIR™ (zidovudine/AZT), VIDEX™ (didanosine/ddI), HIVID™ (zalcitabine/ddC), ZERIT™ (stavudine/d4T), EPIVIR™ (lamivudine/3TC), and COMBIVIR™ (zidovudine/lamivudine). Non-nucleoside reverse transcriptase inhibitors that may be administered in combination with the Therapeutics of the invention, include, but are not limited to, VIRAMUNE™ (nevirapine), RESCRIPTOR™ (delavirdine), and SUSTIVA™ (efavirenz). Protease inhibitors that may be administered in combination with the Therapeutics of the invention, include, but are not limited to, CRIXIVAN™ (indinavir), NORVIR™ (ritonavir), INVIRASE™ (saquinavir), and VIRACEPT™ (nelfinavir). In a specific embodiment, antiretroviral agents, nucleoside reverse transcriptase inhibitors, non-nucleoside reverse transcriptase inhibitors, and/or protease inhibitors may be used in any combination with Therapeutics of the invention to treat AIDS and/or to prevent or treat HIV infection.

[0952] In other embodiments, Therapeutics of the invention may be administered in combination with anti-opportunistic infection agents. Anti-opportunistic agents that may be administered in combination with the Therapeutics of the invention, include, but are not limited to, TRIMETHOPRIM-SULFAMETHOXAZOLE™, DAPSONE™, PENTAMIDINE™, ATOVAQUONE™, ISONIAZID™, RIFAMPIN™, PYRAZINAMIDE™, ETHAMBUTOL™, RIFABUTIN™, CLARITHROMYCIN™, AZITROMYCIN™, GANCICLOVIR™, FOSCARNET™, CIDOFOVIR™, FLUCONAZOLE™, ITRACONAZOLE™, KETOCONAZOLE™, ACYCLOVIR™, FAMCICOLVIR™, PYRIMETHAMINE™, LEUCOVORIN™, NEUPOGEN™ (filgrastim/G-CSF), and LEUKINE™ (sargramostim/GM-CSF). In a specific embodiment, Therapeutics of the invention are used in any combination with TRIMETHOPRIM-SULFAMETHOXAZOLE™, DAPSONE™, PENTAMIDINE™, and/or ATOVAQUONE™ to prophylactically treat or prevent an opportunistic Pneumocystis carinii pneumonia infection. In another specific embodiment, Therapeutics of the invention are used in any combination with ISONIAZID™, RIFAMPIN™, PYRAZINAMIDE™, and/or ETHAMBUTOL™ to prophylactically treat or prevent an opportunistic Mycobacterium avium complex infection. In another specific embodiment, Therapeutics of the invention are used in any combination with RIFABUTIN™, CLARITHROMYCIN™, and/or AZITHROMYCIN™ to prophylactically treat or prevent an opportunistic Mycobacterium tuberculosis infection. In another specific embodiment, Therapeutics of the invention are used in any combination with GANCICLOVIR™, FOSCARNET™, and/or CIDOFOVIR™ to prophylactically treat or prevent an opportunistic cytomegalovirus infection. In another specific embodiment, Therapeutics of the invention are used in any combination with FLUCONAZOLE™, ITRACONAZOLE™, and/or KETOCONAZOLE™ to prophylactically treat or prevent an opportunistic fungal infection. In another specific embodiment, Therapeutics of the invention are used in any combination with ACYCLOVIR™ and/or FAMCICOLVIR™ to prophylactically treat or prevent an opportunistic herpes simplex virus type I and/or type II infection. In another specific embodiment, Therapeutics of the invention are used in any combination with PYRIMETHAMINE™ and/or LEUCOVORIN™ to prophylactically treat or prevent an opportunistic Toxoplasma gondii infection. In another specific embodiment, Therapeutics of the invention are used in any combination with LEUCOVORIN™ and/or NEUPOGEN™ to prophylactically treat or prevent an opportunistic bacterial infection.

[0953] In a further embodiment, the Therapeutics of the invention are administered in combination with an antiviral agent. Antiviral agents that may be administered with the Therapeutics of the invention include, but are not limited to, acyclovir, ribavirin, amantadine, and remantidine.

[0954] In a further embodiment, the Therapeutics of the invention are administered in combination with an antibiotic agent. Antibiotic agents that may be administered with the Therapeutics of the invention include, but are not limited to, amoxicillin, beta-lactamases, aminoglycosides, beta-lactam (glycopeptide), beta-lactamases, Clindamycin, chloramphenicol, cephalosporins, ciprofloxacin, ciprofloxacin, erythromycin, fluoroquinolones, macrolides, metronidazole, penicillins, quinolones, rifampin, streptomycin, sulfonamide, tetracyclines, trimethoprim, trimethoprim-sulfamthoxazole, and vancomycin.

[0955] Conventional nonspecific immunosuppressive agents, that may be administered in combination with the Therapeutics of the invention include, but are not limited to, steroids, cyclosporine, cyclosporine analogs, cyclophosphamide methylprednisone, prednisone, azathioprine, FK-506, 15-deoxyspergualin, and other immunosuppressive agents that act by suppressing the function of responding T cells.

[0956] In specific embodiments, Therapeutics of the invention are administered in combination with immunosuppressants. Immunosuppressants preparations that may be administered with the Therapeutics of the invention include, but are not limited to, ORTHOCLONE™ (OKT3), SANDIMMUNE™/NEORAL™/SANGDYA™ (cyclosporin), PROGRAF™ (tacrolimus), CELLCEPT™ (mycophenolate), Azathioprine, glucorticosteroids, and RAPAMTNE™ (sirolimus). In a specific embodiment, immunosuppressants may be used to prevent rejection of organ or bone marrow transplantation.

[0957] In an additional embodiment, Therapeutics of the invention are administered alone or in combination with one or more intravenous immune globulin preparations. Intravenous immune globulin preparations that may be administered with the Therapeutics of the invention include, but not limited to, GAMMAR™, IVEEGAM™, SANDOGLOBULIN™, GAMMAGARD S/D™, and GAMIMUNE™. In a specific embodiment, Therapeutics of the invention are administered in combination with intravenous immune globulin preparations in transplantation therapy (e.g., bone marrow transplant).

[0958] In an additional embodiment, the Therapeutics of the invention are administered alone or in combination with an anti-inflammatory agent. Anti-inflammatory agents that may be administered with the Therapeutics of the invention include, but are not limited to, glucocorticoids and the nonsteroidal anti-inflammatories, aminoarylcarboxylic acid derivatives, arylacetic acid derivatives, arylbutyric acid derivatives, arylcarboxylic acids, arylpropionic acid derivatives, pyrazoles, pyrazolones, salicylic acid derivatives, thiazinecarboxamides, e-acetamidocaproic acid, S-adenosylmethionine, 3-amino-4-hydroxybutyric acid, amixetrine, bendazac, benzydamine, bucolome, difenpiramide, ditazol, emorfazone, guaiazulene, nabumetone, nimesulide, orgotein, oxaceprol, paranyline, perisoxal, pifoxime, proquazone, proxazole, and tenidap.

[0959] In another embodiment, compostions of the invention are administered in combination with a chemotherapeutic agent. Chemotherapeutic agents that may be administered with the Therapeutics of the invention include, but are not limited to, antibiotic derivatives (e.g., doxorubicin, bleomycin, daunorubicin, and dactinomycin); antiestrogens (e.g., tamoxifen); antimetabolites (e.g., fluorouracil, 5-FU, methotrexate, floxuridine, interferon alpha-2b, glutamic acid, plicamycin, mercaptopurine, and 6-thioguanine); cytotoxic agents (e.g., carmustine, BCNU, lomustine, CCNU, cytosine arabinoside, cyclophosphamide, estramustine, hydroxyurea, procarbazine, mitomycin, busulfan, cis-platin, and vincristine sulfate); hormones (e.g., medroxyprogesterone, estramustine phosphate sodium, ethinyl estradiol, estradiol, megestrol acetate, methyltestosterone, diethylstilbestrol diphosphate, chlorotrianisene, and testolactone); nitrogen mustard derivatives (e.g., mephalen, chorambucil, mechlorethamine (nitrogen mustard) and thiotepa); steroids and combinations (e.g., bethamethasone sodium phosphate); and others (e.g., dicarbazine, asparaginase, mitotane, vincristine sulfate, vinblastine sulfate, and etoposide).

[0960] In a specific embodiment, Therapeutics of the invention are administered in combination with CHOP (cyclophosphamide, doxorubicin, vincristine, and prednisone) or any combination of the components of CHOP. In another embodiment, Therapeutics of the invention are administered in combination with Rituximab. In a further embodiment, Therapeutics of the invention are administered with Rituxmab and CHOP, or Rituxmab and any combination of the components of CHOP.

[0961] In an additional embodiment, the Therapeutics of the invention are administered in combination with cytokines. Cytokines that may be administered with the Therapeutics of the invention include, but are not limited to, IL2, IL3, IL4, 1IL5, IL6, IL7, IL10, IL12, IL13, IL15, anti-CD40, CD40L, IFN-gamma and TNF-alpha. In another embodiment, Therapeutics of the invention may be administered with any interleukin, including, but not limited to, IL-1alpha, IL-1beta, IL-2, IL-3, IL-4, IL-5, IL-6, IL-7, IL-8, IL-9, IL-10, IL-11, IL-12, IL-13, IL-14, IL-15, IL-16, IL-17, IL-18, IL-19, IL-20, and IL-21.

[0962] In an additional embodiment, the Therapeutics of the invention are administered in combination with angiogenic proteins. Angiogenic proteins that may be administered with the Therapeutics of the invention include, but are not limited to, Glioma Derived Growth Factor (GDGF), as disclosed in European Patent Number EP-399816; Platelet Derived Growth Factor-A (PDGF-A), as disclosed in European Patent Number EP-6821 10; Platelet Derived Growth Factor-B (PDGF-B), as disclosed in European Patent Number EP-282317; Placental Growth Factor (PlGF), as disclosed in International Publication Number WO 92/06194; Placental Growth Factor-2 (PlGF-2), as disclosed in Hauser et al., Gorwth Factors, 4:259-268 (1993); Vascular Endothelial Growth Factor (VEGF), as disclosed in International Publication Number WO 90/13649; Vascular Endothelial Growth Factor-A (VEGF-A), as disclosed in European Patent Number EP-506477; Vascular Endothelial Growth Factor-2 (VEGF-2), as disclosed in International Publication Number WO 96/39515; Vascular Endothelial Growth Factor B (VEGF-3); Vascular Endothelial Growth Factor B-186 (VEGF-B186), as disclosed in International Publication Number WO 96/26736; Vascular Endothelial Growth Factor-D (VEGF-D), as disclosed in International Publication Number WO 98/02543; Vascular Endothelial Growth Factor-D (VEGF-D), as disclosed in International Publication Number WO 98/07832; and Vascular Endothelial Growth Factor-E (VEGF-E), as disclosed in German Patent Number DE19639601. The above mentioned references are incorporated herein by reference herein.

[0963] In an additional embodiment, the Therapeutics of the invention are administered in combination with hematopoietic growth factors. Hematopoietic growth factors that may be administered with the Therapeutics of the invention include, but are not limited to, LEUKINE™ (SARGRAMOSTIM™) and NEUPOGEN™ (FILGRASTIM™).

[0964] In an additional embodiment, the Therapeutics of the invention are administered in combination with Fibroblast Growth Factors. Fibroblast Growth Factors that may be administered with the Therapeutics of the invention include, but are not limited to, FGF-1, FGF-2, FGF-3, FGF-4, FGF-5, FGF-6, FGF-7, FGF-8, FGF-9, FGF-10, FGF-11, FGF-12, FGF-13, FGF-14, and FGF-15.

[0965] In additional embodiments, the Therapeutics of the invention are administered in combination with other therapeutic or prophylactic regimens, such as, for example, radiation therapy.

### Example 14

### Method of Treating Decreased Levels of the Polypeptide

[0966] The present invention relates to a method for treating an individual in need of an increased level of a polypeptide of the invention in the body comprising administering to such an individual a composition comprising a therapeutically effective amount of an agonist of the invention (including polypeptides of the invention). Moreover, it will be appreciated that conditions caused by a decrease in the standard or normal expression level of a polypeptide of the present invention in an individual can be treated by administering the agonist or antagonist of the present invention. Thus, the invention also provides a method of treatment of an individual in need of an increased level of the polypeptide comprising administering to such an individual a Therapeutic comprising an amount of the agonist or antagonist to increase the activity level of the polypeptide in such an individual.

[0967] For example, a patient with decreased levels of a polypeptide receives a daily dose 0.1-100 ug/kg of the agonist or antagonist for six consecutive days. The exact details of the dosing scheme, based on administration and formulation, are provided in Example 13.

### Example 15

### Method of Treating Increased Levels of the Polypeptide

[0968] The present invention also relates to a method of treating an individual in need of a decreased level of a polypeptide of the invention in the body comprising administering to such an individual a composition comprising a therapeutically effective amount of an antagonist of the invention (including polypeptides and antibodies of the invention).

[0969] In one example, antisense technology is used to inhibit production of a polypeptide of the present invention. This technology is one example of a method of decreasing levels of a polypeptide, due to a variety of etiologies, such as cancer.

[0970] For example, a patient diagnosed with abnormally increased levels of a polypeptide is administered intravenously antisense polynucleotides at 0.5, 1.0, 1.5, 2.0 and 3.0 mg/kg day for 21 days. This treatment is repeated after a 7-day rest period if the treatment was well tolerated. The formulation of the antisense polynucleotide is provided in Example 13.

### Example 16

### Method of Treatment Using Gene Therapy-Ex Vivo

[0971] One method of gene therapy transplants fibroblasts, which are capable of expressing a polypeptide, onto a patient. Generally, fibroblasts are obtained from a subject by skin biopsy. The resulting tissue is placed in tissue-culture medium and separated into small pieces. Small chunks of the tissue are placed on a wet surface of a tissue culture flask, approximately ten pieces are placed in each flask. The flask is turned upside down, closed tight and left at room temperature over night. After 24 hours at room temperature, the flask is inverted and the chunks of tissue remain fixed to the bottom of the flask and fresh media (e.g., Ham's F12 media, with 10% FBS, penicillin and streptomycin) is added. The flasks are then incubated at 37 degree C for approximately one week.

[0972] At this time, fresh media is added and subsequently changed every several days. After an additional two weeks in culture, a monolayer of fibroblasts emerge. The monolayer is trypsinized and scaled into larger flasks.

[0973] pMV-7 (Kirschmeier, P. T. et al., DNA, 7:219-25 (1988)), flanked by the long terminal repeats of the Moloney murine sarcoma virus, is digested with EcoRI and HindIII and subsequently treated with calf intestinal phosphatase. The linear vector is fractionated on agarose gel and purified, using glass beads.

[0974] The cDNA encoding a polypeptide of the present invention can be amplified using PCR primers which correspond to the 5′ and 3′ end sequences respectively as set forth in Example 1 using primers and having appropriate restriction sites and initiation/stop codons, if necessary. Preferably, the 5′ primer contains an EcoRI site and the 3′ primer includes a HindIII site. Equal quantities of the Moloney murine sarcoma virus linear backbone and the amplified EcoRI and HindIII fragment are added together, in the presence of T4 DNA ligase. The resulting mixture is maintained under conditions appropriate for ligation of the two fragments. The ligation mixture is then used to transform bacteria HB101, which are then plated onto agar containing kanamycin for the purpose of confirming that the vector has the gene of interest properly inserted.

[0975] The amphotropic pA317 or GP+am12 packaging cells are grown in tissue culture to confluent density in Dulbecco's Modified Eagles Medium (DMEM) with 10% calf serum (CS), penicillin and streptomycin. The MSV vector containing the gene is then added to the media and the packaging cells transduced with the vector. The packaging cells now produce infectious viral particles containing the gene (the packaging cells are now referred to as producer cells).

[0976] Fresh media is added to the transduced producer cells, and subsequently, the media is harvested from a 10 cm plate of confluent producer cells. The spent media, containing the infectious viral particles, is filtered through a millipore filter to remove detached producer cells and this media is then used to infect fibroblast cells. Media is removed from a sub-confluent plate of fibroblasts and quickly replaced with the media from the producer cells. This media is removed and replaced with fresh media. If the titer of virus is high, then virtually all fibroblasts will be infected and no selection is required. If the titer is very low, then it is necessary to use a retroviral vector that has a selectable marker, such as neo or his. Once the fibroblasts have been efficiently infected, the fibroblasts are analyzed to determine whether protein is produced.

[0977] The engineered fibroblasts are then transplanted onto the host, either alone or after having been grown to confluence on cytodex 3 microcarrier beads.

### Example 17

### Gene Therapy Using Endogenous Genes Corresponding To Polynucleotides of the Invention

[0978] Another method of gene therapy according to the present invention involves operably associating the endogenous polynucleotide sequence of the invention with a promoter via homologous recombination as described, for example, in U.S. Pat. No. 5,641,670, issued Jun. 24, 1997; International Publication NO: WO 96/29411, published Sep. 26, 1996; International Publication NO: WO 94/12650, published Aug. 4, 1994; Koller et al., Proc. Natl. Acad. Sci. USA, 86:8932-8935 (1989); and Zijlstra et al., Nature, 342:435-438 (1989). This method involves the activation of a gene which is present in the target cells, but which is not expressed in the cells, or is expressed at a lower level than desired.

[0979] Polynucleotide constructs are made which contain a promoter and targeting sequences, which are homologous to the 5′ non-coding sequence of endogenous polynucleotide sequence, flanking the promoter. The targeting sequence will be sufficiently near the 5′ end of the polynucleotide sequence so the promoter will be operably linked to the endogenous sequence upon homologous recombination. The promoter and the targeting sequences can be amplified using PCR. Preferably, the amplified promoter contains distinct restriction enzyme sites on the 5′ and 3′ ends. Preferably, the 3′ end of the first targeting sequence contains the same restriction enzyme site as the 5′ end of the amplified promoter and the 5′ end of the second targeting sequence contains the same restriction site as the 3′ end of the amplified promoter.

[0980] The amplified promoter and the amplified targeting sequences are digested with the appropriate restriction enzymes and subsequently treated with calf intestinal phosphatase. The digested promoter and digested targeting sequences are added together in the presence of T4 DNA ligase. The resulting mixture is maintained under conditions appropriate for ligation of the two fragments. The construct is size fractionated on an agarose gel then purified by phenol extraction and ethanol precipitation.

[0981] In this Example, the polynucleotide constructs are administered as naked polynucleotides via electroporation. However, the polynucleotide constructs may also be administered with transfection-facilitating agents, such as liposomes, viral sequences, viral particles, precipitating agents, etc. Such methods of delivery are known in the art.

[0982] Once the cells are transfected, homologous recombination will take place which results in the promoter being operably linked to the endogenous polynucleotide sequence. This results in the expression of polynucleotide corresponding to the polynucleotide in the cell. Expression may be detected by immunological staining, or any other method known in the art.

[0983] Fibroblasts are obtained from a subject by skin biopsy. The resulting tissue is placed in DMEM+10% fetal calf serum. Exponentially growing or early stationary phase fibroblasts are trypsinized and rinsed from the plastic surface with nutrient medium. An aliquot of the cell suspension is removed for counting, and the remaining cells are subjected to centrifugation. The supernatant is aspirated and the pellet is resuspended in 5 ml of electroporation buffer (20 mM HEPES pH 7.3, 137 mM NaCl, 5 mM KCl, 0.7 mM Na₂HPO₄, 6 mM dextrose). The cells are recentrifuged, the supernatant aspirated, and the cells resuspended in electroporation buffer containing 1 mg/ml acetylated bovine serum albumin. The final cell suspension contains approximately 3×10⁶ cells/ml. Electroporation should be performed immediately following resuspension.

[0984] Plasmid DNA is prepared according to standard techniques. For example, to construct a plasmid for targeting to the locus corresponding to the polynucleotide of the invention, plasmid pUC18 (MBI Fermentas, Amherst, N.Y.) is digested with HindIII. The CMV promoter is amplified by PCR with an XbaI site on the 5′ end and a BamHI site on the 3end. Two non-coding sequences are amplified via PCR: one non-coding sequence (fragment 1) is amplified with a HindIII site at the 5′ end and an Xba site at the 3end; the other non-coding sequence (fragment 2) is amplified with a BamHI site at the 5end and a HindIII site at the 3′end. The CMV promoter and the fragments (1 and 2) are digested with the appropriate enzymes (CMV promoter—XbaI and BamHI; fragment 1—XbaI; fragment 2—BamHI) and ligated together. The resulting ligation product is digested with HindIII, and ligated with the HindIII-digested pUC18 plasmid.

[0985] Plasmid DNA is added to a sterile cuvette with a 0.4 cm electrode gap (Bio-Rad). The final DNA concentration is generally at least 120 μg/ml. 0.5 ml of the cell suspension (containing approximately 1.5.×10⁶ cells) is then added to the cuvette, and the cell suspension and DNA solutions are gently mixed. Electroporation is performed with a Gene-Pulser apparatus (Bio-Rad). Capacitance and voltage are set at 960 μF and 250-300 V, respectively. As voltage increases, cell survival decreases, but the percentage of surviving cells that stably incorporate the introduced DNA into their genome increases dramatically. Given these parameters, a pulse time of approximately 14-20 mSec should be observed.

[0986] Electroporated cells are maintained at room temperature for approximately 5 min, and the contents of the cuvette are then gently removed with a sterile transfer pipette. The cells are added directly to 10 ml of prewarmed nutrient media (DMEM with 15% calf serum) in a 10 cm dish and incubated at 37 degree C. The following day, the media is aspirated and replaced with 10 ml of fresh media and incubated for a further 16-24 hours.

[0987] The engineered fibroblasts are then injected into the host, either alone or after having been grown to confluence on cytodex 3 microcarrier beads. The fibroblasts now produce the protein product. The fibroblasts can then be introduced into a patient as described above.

### Example 18

### Method of Treatment Using Gene Therapy—In Vivo

[0988] Another aspect of the present invention is using in vivo gene therapy methods to treat disorders, diseases and conditions. The gene therapy method relates to the introduction of naked nucleic acid (DNA, RNA, and antisense DNA or RNA) sequences into an animal to increase or decrease the expression of the polypeptide. The polynucleotide of the present invention may be operatively linked to a promoter or any other genetic elements necessary for the expression of the polypeptide by the target tissue. Such gene therapy and delivery techniques and methods are known in the art, see, for example, WO90/11092, WO98/11779; U.S. Pat. Nos. 5,693,622, 5,705,151, 5,580,859; Tabata et al., Cardiovasc. Res. 35(3):470-479 (1997); Chao et al., Pharmacol. Res. 35(6):517-522 (1997); Wolff, Neuromuscul. Disord. 7(5):314-318 (1997); Schwartz et al., Gene Ther. 3(5):405-411 (1996); Tsurumi et al., Circulation 94(12):3281-3290 (1996) (incorporated herein by reference).

[0989] The polynucleotide constructs may be delivered by any method that delivers injectable materials to the cells of an animal, such as, injection into the interstitial space of tissues (heart, muscle, skin, lung, liver, intestine and the like). The polynucleotide constructs can be delivered in a pharmaceutically acceptable liquid or aqueous carrier.

[0990] The term “naked” polynucleotide, DNA or RNA, refers to sequences that are free from any delivery vehicle that acts to assist, promote, or facilitate entry into the cell, including viral sequences, viral particles, liposome formulations, lipofectin or precipitating agents and the like. However, the polynucleotides of the present invention may also be delivered in liposome formulations (such as those taught in Felgner P. L. et al. (1995) Ann. NY Acad. Sci. 772:126-139 and Abdallah B. et al. (1995) Biol. Cell 85(1):1-7) which can be prepared by methods well known to those skilled in the art.

[0991] The polynucleotide vector constructs used in the gene therapy method are preferably constructs that will not integrate into the host genome nor will they contain sequences that allow for replication. Any strong promoter known to those skilled in the art can be used for driving the expression of DNA. Unlike other gene therapies techniques, one major advantage of introducing naked nucleic acid sequences into target cells is the transitory nature of the polynucleotide synthesis in the cells. Studies have shown that non-replicating DNA sequences can be introduced into cells to provide production of the desired polypeptide for periods of up to six months.

[0992] The polynucleotide construct can be delivered to the interstitial space of tissues within the an animal, including of muscle, skin, brain, lung, liver, spleen, bone marrow, thymus, heart, lymph, blood, bone, cartilage, pancreas, kidney, gall bladder, stomach, intestine, testis, ovary, uterus, rectum, nervous system, eye, gland, and connective tissue. Interstitial space of the tissues comprises the intercellular fluid, mucopolysaccharide matrix among the reticular fibers of organ tissues, elastic fibers in the walls of vessels or chambers, collagen fibers of fibrous tissues, or that same matrix within connective tissue ensheathing muscle cells or in the lacunae of bone. It is similarly the space occupied by the plasma of the circulation and the lymph fluid of the lymphatic channels. Delivery to the interstitial space of muscle tissue is preferred for the reasons discussed below. They may be conveniently delivered by injection into the tissues comprising these cells. They are preferably delivered to and expressed in persistent, non-dividing cells which are differentiated, although delivery and expression may be achieved in non-differentiated or less completely differentiated cells, such as, for example, stem cells of blood or skin fibroblasts. In vivo muscle cells are particularly competent in their ability to take up and express polynucleotides.

[0993] For the naked polynucleotide injection, an effective dosage amount of DNA or RNA will be in the range of from about 0.05 g/kg body weight to about 50 mg/kg body weight. Preferably the dosage will be from about 0.005 mg/kg to about 20 mg/kg and more preferably from about 0.05 mg/kg to about 5 mg/kg. Of course, as the artisan of ordinary skill will appreciate, this dosage will vary according to the tissue site of injection. The appropriate and effective dosage of nucleic acid sequence can readily be determined by those of ordinary skill in the art and may depend on the condition being treated and the route of administration. The preferred route of administration is by the parenteral route of injection into the interstitial space of tissues. However, other parenteral routes may also be used, such as, inhalation of an aerosol formulation particularly for delivery to lungs or bronchial tissues, throat or mucous membranes of the nose. In addition, naked polynucleotide constructs can be delivered to arteries during angioplasty by the catheter used in the procedure.

[0994] The dose response effects of injected polynucleotide in muscle in vivo is determined as follows. Suitable template DNA for production of mRNA coding for polypeptide of the present invention is prepared in accordance with a standard recombinant DNA methodology. The template DNA, which may be either circular or linear, is either used as naked DNA or complexed with liposomes. The quadriceps muscles of mice are then injected with various amounts of the template DNA.

[0995] Five to six week old female and male Balb/C mice are anesthetized by intraperitoneal injection with 0.3 ml of 2.5% Avertin. A 1.5 cm incision is made on the anterior thigh, and the quadriceps muscle is directly visualized. The template DNA is injected in 0.1 ml of carrier in a 1 cc syringe through a 27 gauge needle over one minute, approximately 0.5 cm from the distal insertion site of the muscle into the knee and about 0.2 cm deep. A suture is placed over the injection site for future localization, and the skin is closed with stainless steel clips.

[0996] After an appropriate incubation time (e.g., 7 days) muscle extracts are prepared by excising the entire quadriceps. Every fifth 15 um cross-section of the individual quadriceps muscles is histochemically stained for protein expression. A time course for protein expression may be done in a similar fashion except that quadriceps from different mice are harvested at different times. Persistence of DNA in muscle following injection may be determined by Southern blot analysis after preparing total cellular DNA and HIRT supernatants from injected and control mice. The results of the above experimentation in mice can be use to extrapolate proper dosages and other treatment parameters in humans and other animals using naked DNA.

### Example 19

### Transgenic Animals

[0997] The polypeptides of the invention can also be expressed in transgenic animals. Animals of any species, including, but not limited to, mice, rats, rabbits, hamsters, guinea pigs, pigs, micro-pigs, goats, sheep, cows and non-human primates, e.g., baboons, monkeys, and chimpanzees may be used to generate transgenic animals. In a specific embodiment, techniques described herein or otherwise known in the art, are used to express polypeptides of the invention in humans, as part of a gene therapy protocol.

[0998] Any technique known in the art may be used to introduce the transgene (i.e., polynucleotides of the invention) into animals to produce the founder lines of transgenic animals. Such techniques include, but are not limited to, pronuclear microinjection (Paterson et al., Appl. Microbiol. Biotechnol. 40:691-698 (1994); Carver et al., Biotechnology (NY) 11:1263-1270 (1993); Wright et al., Biotechnology (NY) 9:830-834 (1991); and Hoppe et al., U.S. Pat. No. 4,873,191 (1989)); retrovirus mediated gene transfer into germ lines (Van der Putten et al., Proc. Natl. Acad. Sci., USA 82:6148-6152 (1985)), blastocysts or embryos; gene targeting in embryonic stem cells (Thompson et al., Cell 56:313-321 (1989)); electroporation of cells or embryos (Lo, 1983, Mol Cell. Biol. 3:1803-1814 (1983)); introduction of the polynucleotides of the invention using a gene gun (see, e.g., Ulmer et al., Science 259:1745 (1993); introducing nucleic acid constructs into embryonic pleuripotent stem cells and transferring the stem cells back into the blastocyst; and sperm-mediated gene transfer (Lavitrano et al., Cell 57:717-723 (1989); etc. For a review of such techniques, see Gordon, “Transgenic Animals,” Intl. Rev. Cytol. 115:171-229 (1989), which is incorporated by reference herein in its entirety.

[0999] Any technique known in the art may be used to produce transgenic clones containing polynucleotides of the invention, for example, nuclear transfer into enucleated oocytes of nuclei from cultured embryonic, fetal, or adult cells induced to quiescence (Campell et al., Nature 380:64-66 (1996); Wilmut et al., Nature 385:810-813 (1997)).

[1000] The present invention provides for transgenic animals that carry the transgene in all their cells, as well as animals which carry the transgene in some, but not all their cells, i.e., mosaic animals or chimeric. The transgene may be integrated as a single transgene or as multiple copies such as in concatamers, e.g., head-to-head tandems or head-to-tail tandems. The transgene may also be selectively introduced into and activated in a particular cell type by following, for example, the teaching of Lasko et al. (Lasko et al., Proc. Natl. Acad. Sci. USA 89:6232-6236 (1992)). The regulatory sequences required for such a cell-type specific activation will depend upon the particular cell type of interest, and will be apparent to those of skill in the art. When it is desired that the polynucleotide transgene be integrated into the chromosomal site of the endogenous gene, gene targeting is preferred. Briefly, when such a technique is to be utilized, vectors containing some nucleotide sequences homologous to the endogenous gene are designed for the purpose of integrating, via homologous recombination with chromosomal sequences, into and disrupting the function of the nucleotide sequence of the endogenous gene. The transgene may also be selectively introduced into a particular cell type, thus inactivating the endogenous gene in only that cell type, by following, for example, the teaching of Gu et al. (Gu et al., Science 265:103-106 (1994)). The regulatory sequences required for such a cell-type specific inactivation will depend upon the particular cell type of interest, and will be apparent to those of skill in the art.

[1001] Once transgenic animals have been generated, the expression of the recombinant gene may be assayed utilizing standard techniques. Initial screening may be accomplished by Southern blot analysis or PCR techniques to analyze animal tissues to verify that integration of the transgene has taken place. The level of mRNA expression of the transgene in the tissues of the transgenic animals may also be assessed using techniques which include, but are not limited to, Northern blot analysis of tissue samples obtained from the animal, in situ hybridization analysis, and reverse transcriptase-PCR (rt-PCR). Samples of transgenic gene-expressing tissue may also be evaluated immunocytochemically or immunohistochemically using antibodies specific for the transgene product.

[1002] Once the founder animals are produced, they may be bred, inbred, outbred, or crossbred to produce colonies of the particular animal. Examples of such breeding strategies include, but are not limited to: outbreeding of founder animals with more than one integration site in order to establish separate lines; inbreeding of separate lines in order to produce compound transgenics that express the transgene at higher levels because of the effects of additive expression of each transgene; crossing of heterozygous transgenic animals to produce animals homozygous for a given integration site in order to both augment expression and eliminate the need for screening of animals by DNA analysis; crossing of separate homozygous lines to produce compound heterozygous or homozygous lines; and breeding to place the transgene on a distinct background that is appropriate for an experimental model of interest.

[1003] Transgenic animals of the invention have uses which include, but are not limited to, animal model systems useful in elaborating the biological function of polypeptides of the present invention, studying conditions and/or disorders associated with aberrant expression, and in screening for compounds effective in ameliorating such conditions and/or disorders.

### Example 20

### Knock-Out Animals

[1004] Endogenous gene expression can also be reduced by inactivating or “knocking out” the gene and/or its promoter using targeted homologous recombination. (E.g., see Smithies et al., Nature 317:230-234 (1985); Thomas & Capecchi, Cell 51:503-512 (1987); Thompson et al., Cell 5:313-321 (1989); each of which is incorporated by reference herein in its entirety). For example, a mutant, non-functional polynucleotide of the invention (or a completely unrelated DNA sequence) flanked by DNA homologous to the endogenous polynucleotide sequence (either the coding regions or regulatory regions of the gene) can be used, with or without a selectable marker and/or a negative selectable marker, to transfect cells that express polypeptides of the invention in vivo. In another embodiment, techniques known in the art are used to generate knockouts in cells that contain, but do not express the gene of interest. Insertion of the DNA construct, via targeted homologous recombination, results in inactivation of the targeted gene. Such approaches are particularly suited in research and agricultural fields where modifications to embryonic stem cells can be used to generate animal offspring with an inactive targeted gene (e.g., see Thomas & Capecchi 1987 and Thompson 1989, supra). However this approach can be routinely adapted for use in humans provided the recombinant DNA constructs are directly administered or targeted to the required site in vivo using appropriate viral vectors that will be apparent to those of skill in the art.

[1005] In further embodiments of the invention, cells that are genetically engineered to express the polypeptides of the invention, or alternatively, that are genetically engineered not to express the polypeptides of the invention (e.g., knockouts) are administered to a patient in vivo. Such cells may be obtained from the patient (i.e., animal, including human) or an MHC compatible donor and can include, but are not limited to fibroblasts, bone marrow cells, blood cells (e., lymphocytes), adipocytes, muscle cells, endothelial cells etc. The cells are genetically engineered in vitro using recombinant DNA techniques to introduce the coding sequence of polypeptides of the invention into the cells, or alternatively, to disrupt the coding sequence and/or endogenous regulatory sequence associated with the polypeptides of the invention, e., by transduction (using viral vectors, and preferably vectors that integrate the transgene into the cell genome) or transfection procedures, including, but not limited to, the use of plasmids, cosmids, YACs, naked DNA, electroporation, liposomes, etc. The coding sequence of the polypeptides of the invention can be placed under the control of a strong constitutive or inducible promoter or promoter/enhancer to achieve expression, and preferably secretion, of the polypeptides of the invention. The engineered cells which express and preferably secrete the polypeptides of the invention can be introduced into the patient systemically, e.g., in the circulation, or intraperitoneally.

[1006] Alternatively, the cells can be incorporated into a matrix and implanted in the body, e.g., genetically engineered fibroblasts can be implanted as part of a skin graft; genetically engineered endothelial cells can be implanted as part of a lymphatic or vascular graft. (See, for example, Anderson et al. U.S. Pat. No. 5,399,349; and Mulligan & Wilson, U.S. Pat. No. 5,460,959 each of which is incorporated by reference herein in its entirety).

[1007] When the cells to be administered are non-autologous or non-MHC compatible cells, they can be administered using well known techniques which prevent the development of a host immune response against the introduced cells. For example, the cells may be introduced in an encapsulated form which, while allowing for an exchange of components with the immediate extracellular environment, does not allow the introduced cells to be recognized by the host immune system.

[1008] Transgenic and “knock-out” animals of the invention have uses which include, but are not limited to, animal model systems useful in elaborating the biological function of polypeptides of the present invention, studying conditions and/or disorders associated with aberrant expression, and in screening for compounds effective in ameliorating such conditions and/or disorders.

### Example 21

### Assays Detecting Stimulation or Inhibition of B Cell Proliferation and Differentiation

[1009] Generation of functional humoral immune responses requires both soluble and cognate signaling between B-lineage cells and their microenvironment. Signals may impart a positive stimulus that allows a B-lineage cell to continue its programmed development, or a negative stimulus that instructs the cell to arrest its current developmental pathway. To date, numerous stimulatory and inhibitory signals have been found to influence B cell responsiveness including IL-2, IL-4, IL-5, IL-6, IL-7, IL10, IL-13, IL-14 and IL-15. Interestingly, these signals are by themselves weak effectors but can, in combination with various co-stimulatory proteins, induce activation, proliferation, differentiation, homing, tolerance and death among B cell populations.

[1010] One of the best studied classes of B-cell co-stimulatory proteins is the TNF-superfamily. Within this family CD40, CD27, and CD30 along with their respective ligands CD154, CD70, and CD153 have been found to regulate a variety of immune responses. Assays which allow for the detection and/or observation of the proliferation and differentiation of these B-cell populations and their precursors are valuable tools in determining the effects various proteins may have on these B-cell populations in terms of proliferation and differentiation. Listed below are two assays designed to allow for the detection of the differentiation, proliferation, or inhibition of B-cell populations and their precursors.

[1011] In Vitro Assay

[1012] Agonists or antagonists of the invention can be assessed for its ability to induce activation, proliferation, differentiation or inhibition and/or death in B-cell populations and their precursors. The activity of the agonists or antagonists of the invention on purified human tonsillar B cells, measured qualitatively over the dose range from 0.1 to 10,000 ng/mL, is assessed in a standard B-lymphocyte co-stimulation assay in which purified tonsillar B cells are cultured in the presence of either formalin-fixed Staphylococcus aureus Cowan I (SAC) or immobilized anti-human IgM antibody as the priming agent. Second signals such as IL-2 and IL-15 synergize with SAC and IgM crosslinking to elicit B cell proliferation as measured by tritiated-thymidine incorporation. Novel synergizing agents can be readily identified using this assay. The assay involves isolating human tonsillar B cells by magnetic bead (MACS) depletion of CD3-positive cells. The resulting cell population is greater than 95% B cells as assessed by expression of CD45R(B220).

[1013] Various dilutions of each sample are placed into individual wells of a 96-well plate to which are added 10⁵ B-cells suspended in culture medium (RPMI 1640 containing 10% FBS, 5×10⁻⁵M 2ME, 100 U/ml penicillin, 10 ug/ml streptomycin, and 10⁻⁵ dilution of SAC) in a total volume of 150 ul. Proliferation or inhibition is quantitated by a 20 h pulse (1 uCi/well) with 3H-thymidine (6.7 Ci/mM) beginning 72 h post factor addition. The positive and negative controls are IL2 and medium respectively.

[1014] In Vivo Assay

[1015] BALB/c mice are injected (i.p.) twice per day with buffer only, or 2 mg/Kg of agonists or antagonists of the invention, or truncated forms thereof. Mice receive this treatment for 4 consecutive days, at which time they are sacrificed and various tissues and serum collected for analyses. Comparison of H&E sections from normal spleens and spleens treated with agonists or antagonists of the invention identify the results of the activity of the agonists or antagonists on spleen cells, such as the diffusion of peri-arterial lymphatic sheaths, and/or significant increases in the nucleated cellularity of the red pulp regions, which may indicate the activation of the differentiation and proliferation of B-cell populations. Immunohistochemical studies using a B cell marker, anti-CD45R(B220), are used to determine whether any physiological changes to splenic cells, such as splenic disorganization, are due to increased B-cell representation within loosely defined B-cell zones that infiltrate established T-cell regions.

[1016] Flow cytometric analyses of the spleens from mice treated with agonist or antagonist is used to indicate whether the agonists or antagonists specifically increases the proportion of ThB+, CD45R(B220)dull B cells over that which is observed in control mice.

[1017] Likewise, a predicted consequence of increased mature B-cell representation in vivo is a relative increase in serum Ig titers. Accordingly, serum IgM and IgA levels are compared between buffer and agonists or antagonists-treated mice.

[1018] The studies described in this example tested activity of agonists or antagonists of the invention. However, one skilled in the art could easily modify the exemplified studies to test the activity of polynucleotides or polypeptides of the invention (e.g., gene therapy).

### Example 22

### T Cell Proliferation Assay

[1019] A CD3-induced proliferation assay is performed on PBMCs and is measured by the uptake of ³H-thymidine. The assay is performed as follows. Ninety-six well plates are coated with 100 μl/well of mAb to CD3 (HIT3a, Pharmingen) or isotype-matched control mAb (B33.1) overnight at 4 degrees C (1 μg/ml in 0.05M bicarbonate buffer, pH 9.5), then washed three times with PBS. PBMC are isolated by F/H gradient centrifugation from human peripheral blood and added to quadruplicate wells (5×10⁴/well) of mAb coated plates in RPMI containing 10% FCS and P/S in the presence of varying concentrations of agonists or antagonists of the invention (total volume 200 ul). Relevant protein buffer and medium alone are controls. After 48 hr. culture at 37 degrees C, plates are spun for 2 min. at 1000 rpm and 100 μl of supernatant is removed and stored -20 degrees C for measurement of IL-2 (or other cytokines) if effect on proliferation is observed. Wells are supplemented with 100 ul of medium containing 0.5 uCi of ³H-thymidine and cultured at 37 degrees C for 18-24 hr. Wells are harvested and incorporation of ³H-thymidine used as a measure of proliferation. Anti-CD3 alone is the positive control for proliferation. IL-2 (100 U/ml) is also used as a control which enhances proliferation. Control antibody which does not induce proliferation of T cells is used as the negative controls for the effects of agonists or antagonists of the invention.

[1020] The studies described in this example tested activity of agonists or antagonists of the invention. However, one skilled in the art could easily modify the exemplified studies to test the activity of polynucleotides or polypeptides of the invention (e.g., gene therapy).

### Example 23

### Effect of Agonists or Antagonists of the Invention on the Expression of MHC Class II, Costimulatory and Adhesion Molecules and Cell Differentiation of Monocytes and Monocyte-Derived Human Dendritic Cells

[1021] Dendritic cells are generated by the expansion of proliferating precursors found in the peripheral blood: adherent PBMC or elutriated monocytic fractions are cultured for 7-10 days with GM-CSF (50 ng/ml) and IL4 (20 ng/ml). These dendritic cells have the characteristic phenotype of immature cells (expression of CD1, CD80, CD86, CD40 and MHC class II antigens). Treatment with activating factors, such as TNF-α, causes a rapid change in surface phenotype (increased expression of MHC class I and II, costimulatory and adhesion molecules, downregulation of FCγRII, upregulation of CD83). These changes correlate with increased antigen-presenting capacity and with functional maturation of the dendritic cells.

[1022] FACS analysis of surface antigens is performed as follows. Cells are treated 1-3 days with increasing concentrations of agonist or antagonist of the invention or LPS (positive control), washed with PBS containing 1% BSA and 0.02 mM sodium azide, and then incubated with 1:20 dilution of appropriate FITC- or PE-labeled monoclonal antibodies for 30 minutes at 4 degrees C. After an additional wash, the labeled cells are analyzed by flow cytometry on a FACScan (Becton Dickinson).

[1023] Effect on the Production of Cytokines.

[1024] Cytokines generated by dendritic cells, in particular IL-12, are important in the initiation of T-cell dependent immune responses. IL-12 strongly influences the development of Th1 helper T-cell immune response, and induces cytotoxic T and NK cell function. An ELISA is used to measure the IL-12 release as follows. Dendritic cells (10⁶/ml) are treated with increasing concentrations of agonists or antagonists of the invention for 24 hours. LPS (100 ng/ml) is added to the cell culture as positive control. Supernatants from the cell cultures are then collected and analyzed for IL-12 content using commercial ELISA kit (e.g, R & D Systems (Minneapolis, Minn.)). The standard protocols provided with the kits are used.

[1025] Effect on the Expression of MHC Class II, Costimulatory and Adhesion Molecules.

[1026] Three major families of cell surface antigens can be identified on monocytes: adhesion molecules, molecules involved in antigen presentation, and Fc receptor. Modulation of the expression of MHC class II antigens and other costimulatory molecules, such as B7 and ICAM-1, may result in changes in the antigen presenting capacity of monocytes and ability to induce T cell activation. Increase expression of Fc receptors may correlate with improved monocyte cytotoxic activity, cytokine release and phagocytosis.

[1027] FACS analysis is used to examine the surface antigens as follows. Monocytes are treated 1-5 days with increasing concentrations of agonists or antagonists of the invention or LPS (positive control), washed with PBS containing 1% BSA and 0.02 mM sodium azide, and then incubated with 1:20 dilution of appropriate FITC- or PE-labeled monoclonal antibodies for 30 minutes at 4 degreesC. After an additional wash, the labeled cells are analyzed by flow cytometry on a FACScan (Becton Dickinson).

[1028] Monocyte Activation and/or Increased Survival.

[1029] Assays for molecules that activate (or alternatively, inactivate) monocytes and/or increase monocyte survival (or alternatively, decrease monocyte survival) are known in the art and may routinely be applied to determine whether a molecule of the invention functions as an inhibitor or activator of monocytes. Agonists or antagonists of the invention can be screened using the three assays described below. For each of these assays, Peripheral blood mononuclear cells (PBMC) are purified from single donor leukopacks (American Red Cross, Baltimore, Md.) by centrifugation through a Histopaque gradient (Sigma). Monocytes are isolated from PBMC by counterflow centrifugal elutriation.

[1030] Monocyte Survival Assay.

[1031] Human peripheral blood monocytes progressively lose viability when cultured in absence of serum or other stimuli. Their death results from internally regulated process (apoptosis). Addition to the culture of activating factors, such as TNF-alpha dramatically improves cell survival and prevents DNA fragmentation. Propidium iodide (PI) staining is used to measure apoptosis as follows. Monocytes are cultured for 48 hours in polypropylene tubes in serum-free medium (positive control), in the presence of 100 ng/ml TNF-alpha (negative control), and in the presence of varying concentrations of the compound to be tested. Cells are suspended at a concentration of 2×10⁶/ml in PBS containing PI at a final concentration of 5 μg/ml, and then incubaed at room temperature for 5 minutes before FACScan analysis. PI uptake has been demonstrated to correlate with DNA fragmentation in this experimental paradigm.

[1032] Effect on Cytokine Release.

[1033] An important function of monocytes/macrophages is their regulatory activity on other cellular populations of the immune system through the release of cytokines after stimulation. An ELISA to measure cytokine release is performed as follows. Human monocytes are incubated at a density of 5×10⁵ cells/ml with increasing concentrations of agonists or antagonists of the invention and under the same conditions, but in the absence of agonists or antagonists. For IL-12 production, the cells are primed overnight with IFN (100 U/ml) in presence of agonist or antagonist of the invention. LPS (10 ng/ml) is then added. Conditioned media are collected after 24 h and kept frozen until use. Measurement of TNF-alpha, IL-10, MCP-1 and IL-8 is then performed using a commercially available ELISA kit (e.g, R & D Systems (Minneapolis, Minn.)) and applying the standard protocols provided with the kit.

[1034] Oxidative Burst.

[1035] Purified monocytes are plated in 96-w plate at 2-1×10⁵ cell/well. Increasing concentrations of agonists or antagonists of the invention are added to the wells in a total volume of 0.2 ml culture medium (RPMI 1640+10% FCS, glutamine and antibiotics). After 3 days incubation, the plates are centrifuged and the medium is removed from the wells. To the macrophage monolayers, 0.2 ml per well of phenol red solution (140 mM NaCl, 10 mM potassium phosphate buffer pH 7.0, 5.5 mM dextrose, 0.56 mM phenol red and 19 U/ml of HRPO) is added, together with the stimulant (200 nM PMA). The plates are incubated at 37° C. for 2 hours and the reaction is stopped by adding 20 μl 1N NaOH per well. The absorbance is read at 610 nm. To calculate the amount of H₂O₂ produced by the macrophages, a standard curve of a H₂O₂ solution of known molarity is performed for each experiment.

[1036] The studies described in this example tested activity of agonists or antagonists of the invention. However, one skilled in the art could easily modify the exemplified studies to test the activity of polynucleotides or polypeptides of the invention (e.g., gene therapy).

### Example 24

### Biological Effects of Agonists or Antagonists of the Invention

[1037] Astrocyte and Neuronal Assays.

[1038] Agonists or antagonists of the invention, expressed in Escherichia coli and purified as described above, can be tested for activity in promoting the survival, neurite outgrowth, or phenotypic differentiation of cortical neuronal cells and for inducing the proliferation of glial fibrillary acidic protein immunopositive cells, astrocytes. The selection of cortical cells for the bioassay is based on the prevalent expression of FGF-1 and FGF-2 in cortical structures and on the previously reported enhancement of cortical neuronal survival resulting from FGF-2 treatment. A thymidine incorporation assay, for example, can be used to elucidate an agonist or antagonist of the invention's activity on these cells.

[1039] Moreover, previous reports describing the biological effects of FGF-2 (basic FGF) on cortical or hippocampal neurons in vitro have demonstrated increases in both neuron survival and neurite outgrowth (Walicke et al., “Fibroblast growth factor promotes survival of dissociated hippocampal neurons and enhances neurite extension.” Proc. Natl. Acad. Sci. USA 83:3012-3016. (1986), assay herein incorporated by reference in its entirety). However, reports from experiments done on PC-12 cells suggest that these two responses are not necessarily synonymous and may depend on not only which FGF is being tested but also on which receptor(s) are expressed on the target cells. Using the primary cortical neuronal culture paradigm, the ability of an agonist or antagonist of the invention to induce neurite outgrowth can be compared to the response achieved with FGF-2 using, for example, a thymidine incorporation assay.

[1040] Fibroblast and Endothelial Cell Assays.

[1041] Human lung fibroblasts are obtained from Clonetics (San Diego, Calif.) and maintained in growth media from Clonetics. Dermal microvascular endothelial cells are obtained from Cell Applications (San Diego, Calif.). For proliferation assays, the human lung fibroblasts and dermal microvascular endothelial cells can be cultured at 5,000 cells/well in a 96-well plate for one day in growth medium. The cells are then incubated for one day in 0.1% BSA basal medium. After replacing the medium with fresh 0.1% BSA medium, the cells are incubated with the test proteins for 3 days. Alamar Blue (Alamar Biosciences, Sacramento, Calif.) is added to each well to a final concentration of 10%. The cells are incubated for 4 hr. Cell viability is measured by reading in a CytoFluor fluorescence reader. For the PGE₂ assays, the human lung fibroblasts are cultured at 5,000 cells/well in a 96-well plate for one day. After a medium change to 0.1% BSA basal medium, the cells are incubated with FGF-2 or agonists or antagonists of the invention with or without IL-1α for 24 hours. The supernatants are collected and assayed for PGE₂ by EIA kit (Cayman, Ann Arbor, Mich.). For the IL-6 assays, the human lung fibroblasts are cultured at 5,000 cells/well in a 96-well plate for one day. After a medium change to 0.1% BSA basal medium, the cells are incubated with FGF-2 or with or without agonists or antagonists of the invention IL-1α for 24 hours. The supernatants are collected and assayed for IL-6 by ELISA kit (Endogen, Cambridge, Mass.).

[1042] Human lung fibroblasts are cultured with FGF-2 or agonists or antagonists of the invention for 3 days in basal medium before the addition of Alamar Blue to assess effects on growth of the fibroblasts. FGF-2 should show a stimulation at 10-2500 ng/ml which can be used to compare stimulation with agonists or antagonists of the invention.

[1043] Parkinson Models.

[1044] The loss of motor function in Parkinson's disease is attributed to a deficiency of striatal dopamine resulting from the degeneration of the nigrostriatal dopaminergic projection neurons. An animal model for Parkinson's that has been extensively characterized involves the systemic administration of 1-methyl-4 phenyl 1,2,3,6-tetrahydropyridine (MPTP). In the CNS, MPTP is taken-up by astrocytes and catabolized by monoamine oxidase B to 1-methyl-4-phenyl pyridine (MPP⁺) and released. Subsequently, MPP⁺ is actively accumulated in dopaminergic neurons by the high-affinity reuptake transporter for dopamine. MPP⁺ is then concentrated in mitochondria by the electrochemical gradient and selectively inhibits nicotidamide adenine disphosphate: ubiquinone oxidoreductionase (complex 1), thereby interfering with electron transport and eventually generating oxygen radicals.

[1045] It has been demonstrated in tissue culture paradigms that FGF-2 (basic FGF) has trophic activity towards nigral dopaminergic neurons (Ferrari et al., Dev. Biol. 1989). Recently, Dr. Unsicker's group has demonstrated that administering FGF-2 in gel foam implants in the striatum results in the near complete protection of nigral dopaminergic neurons from the toxicity associated with MPTP exposure (Otto and Unsicker, J. Neuroscience, 1990).

[1046] Based on the data with FGF-2, agonists or antagonists of the invention can be evaluated to determine whether it has an action similar to that of FGF-2 in enhancing dopaminergic neuronal survival in vitro and it can also be tested in vivo for protection of dopaminergic neurons in the striatum from the damage associated with MPTP treatment. The potential effect of an agonist or antagonist of the invention is first examined in vitro in a dopaminergic neuronal cell culture paradigm. The cultures are prepared by dissecting the midbrain floor plate from gestation day 14 Wistar rat embryos. The tissue is dissociated with trypsin and seeded at a density of 200,000 cells/cm² on polyorthininelaminin coated glass coverslips. The cells are maintained in Dulbecco's Modified Eagle's medium and F12 medium containing hormonal supplements (Ni). The cultures are fixed with paraformaldehyde after 8 days in vitro and are processed for tyrosine hydroxylase, a specific marker for dopminergic neurons, immunohistochemical staining. Dissociated cell cultures are prepared from embryonic rats. The culture medium is changed every third day and the factors are also added at that time.

[1047] Since the dopaminergic neurons are isolated from animals at gestation day 14, a developmental time which is past the stage when the dopaminergic precursor cells are proliferating, an increase in the number of tyrosine hydroxylase immunopositive neurons would represent an increase in the number of dopaminergic neurons surviving in vitro. Therefore, if an agonist or antagonist of the invention acts to prolong the survival of dopaminergic neurons, it would suggest that the agonist or antagonist may be involved in Parkinson's Disease.

[1048] The studies described in this example tested activity of agonists or antagonists of the invention. However, one skilled in the art could easily modify the exemplified studies to test the activity of polynucleotides or polypeptides of the invention (e.g., gene therapy).

### Example 25

### The Effect of Agonists or Antagonists of the Invention on the Growth of Vascular Endothelial Cells

[1049] On day 1, human umbilical vein endothelial cells (HUVEC) are seeded at 2-5×10⁴ cells/35 mm dish density in M199 medium containing 4% fetal bovine serum (FBS), 16 units/ml heparin, and 50 units/ml endothelial cell growth supplements (ECGS, Biotechnique, Inc.). On day 2, the medium is replaced with M199 containing 10% FBS, 8 units/ml heparin. An agonist or antagonist of the invention, and positive controls, such as VEGF and basic FGF (bFGF) are added, at varying concentrations. On days 4 and 6, the medium is replaced. On day 8, cell number is determined with a Coulter Counter.

[1050] An increase in the number of HUVEC cells indicates that the compound of the invention may proliferate vascular endothelial cells, while a decrease in the number of HUVEC cell indicates that the compound of the invention inhibits vascular endothelial cells.

[1051] The studies described in this example tested activity of a polypeptide of the invention. However, one skilled in the art could easily modify the exemplified studies to test the activity of polynucleotides (e.g., gene therapy), agonists, and/or antagonists of the invention.

### Example 26

### Rat Corneal Wound Healing Model

[1052] This animal model shows the effect of an agonist or antagonist of the invention on neovascularization. The experimental protocol includes:

[1053] a) Making a 1-1.5 mm long incision from the center of cornea into the stromal layer.

[1054] b) Inserting a spatula below the lip of the incision facing the outer corner of the eye.

[1055] c) Making a pocket (its base is 1-1.5 mm form the edge of the eye).

[1056] d) Positioning a pellet, containing 50 ng-5 ng of an agonist or antagonist of the invention, within the pocket.

[1057] e) Treatment with an agonist or antagonist of the invention can also be applied topically to the corneal wounds in a dosage range of 20 mg -500 mg (daily treatment for five days).

[1058] The studies described in this example tested activity of agonists or antagonists of the invention. However, one skilled in the art could easily modify the exemplified studies to test the activity of polynucleotides or polypeptides of the invention (e.g., gene therapy).

### Example 27

### Diabetic Mouse and Glucocorticoid-Impaired Wound Healing Models

[1059] A. Diabetic db+/db+ Mouse Model.

[1060] To demonstrate that an agonist or antagonist of the invention accelerates the healing process, the genetically diabetic mouse model of wound healing is used. The full thickness wound healing model in the db+/db+ mouse is a well characterized, clinically relevant and reproducible model of impaired wound healing. Healing of the diabetic wound is dependent on formation of granulation tissue and re-epithelialization rather than contraction (Gartner, M. H. et al., J. Surg. Res. 52:389 (1992); Greenhalgh, D. G. et al., Am. J. Pathol. 136:1235 (1990)).

[1061] The diabetic animals have many of the characteristic features observed in Type II diabetes mellitus. Homozygous (db+/db+) mice are obese in comparison to their normal heterozygous (db+/+m) littermates. Mutant diabetic (db+/db+) mice have a single autosomal recessive mutation on chromosome 4 (db+) (Coleman et al. Proc. Natl. Acad. Sci. USA 77:283-293 (1982)). Animals show polyphagia, polydipsia and polyuria. Mutant diabetic mice (db+/db+) have elevated blood glucose, increased or normal insulin levels, and suppressed cell-mediated immunity (Mandel et al., J. Immunol. 120:1375 (1978); Debray-Sachs, M. et al., Clin. Exp. Immunol. 51(1):1-7 (1983); Leiter et al., Am. J. of Pathol. 114:46-55 (1985)). Peripheral neuropathy, myocardial complications, and microvascular lesions, basement membrane thickening and glomerular filtration abnormalities have been described in these animals (Norido, F. et al., Exp. Neurol. 83(2):221-232 (1984); Robertson et al., Diabetes 29(1):60-67 (1980); Giacomelli et al., Lab Invest. 40(4):460-473 (1979); Coleman, D. L., Diabetes 31 (Suppl): 1-6 (1982)). These homozygous diabetic mice develop hyperglycemia that is resistant to insulin analogous to human type II diabetes (Mandel et al., J. Immunol. 120:1375-1377 (1978)).

[1062] The characteristics observed in these animals suggests that healing in this model may be similar to the healing observed in human diabetes (Greenhalgh, et al., Am. J. of Pathol. 136:1235-1246 (1990)).

[1063] Genetically diabetic female C57BL/KsJ (db+/db+) mice and their non-diabetic (db+/+m) heterozygous littermates are used in this study (Jackson Laboratories). The animals are purchased at 6 weeks of age and are 8 weeks old at the beginning of the study. Animals are individually housed and received food and water ad libitum. All manipulations are performed using aseptic techniques. The experiments are conducted according to the rules and guidelines of Human Genome Sciences, Inc. Institutional Animal Care and Use Committee and the Guidelines for the Care and Use of Laboratory Animals.

[1064] Wounding protocol is performed according to previously reported methods (Tsuboi, R. and Rifkin, D. B., J. Exp. Med. 172:245-251 (1990)). Briefly, on the day of wounding, animals are anesthetized with an intraperitoneal injection of Avertin (0.01 mg/mL), 2,2,2-tribromoethanol and 2-methyl-2-butanol dissolved in deionized water. The dorsal region of the animal is shaved and the skin washed with 70% ethanol solution and iodine. The surgical area is dried with sterile gauze prior to wounding. An 8 mm full-thickness wound is then created using a Keyes tissue punch. Immediately following wounding, the surrounding skin is gently stretched to eliminate wound expansion. The wounds are left open for the duration of the experiment. Application of the treatment is given topically for 5 consecutive days commencing on the day of wounding. Prior to treatment, wounds are gently cleansed with sterile saline and gauze sponges.

[1065] Wounds are visually examined and photographed at a fixed distance at the day of surgery and at two day intervals thereafter. Wound closure is determined by daily measurement on days 1-5 and on day 8. Wounds are measured horizontally and vertically using a calibrated Jameson caliper. Wounds are considered healed if granulation tissue is no longer visible and the wound is covered by a continuous epithelium.

[1066] An agonist or antagonist of the invention is administered using at a range different doses, from 4 mg to 500 mg per wound per day for 8 days in vehicle. Vehicle control groups received 50 mL of vehicle solution.

[1067] Animals are euthanized on day 8 with an intraperitoneal injection of sodium pentobarbital (300 mg/kg). The wounds and surrounding skin are then harvested for histology and immunohistochemistry. Tissue specimens are placed in 10% neutral buffered formalin in tissue cassettes between biopsy sponges for further processing. Three groups of 10 animals each (5 diabetic and 5 non-diabetic controls) are evaluated: 1) Vehicle placebo control, 2) untreated group, and 3) treated group.

[1068] Wound closure is analyzed by measuring the area in the vertical and horizontal axis and obtaining the total square area of the wound. Contraction is then estimated by establishing the differences between the initial wound area (day 0) and that of post treatment (day 8). The wound area on day 1 is 64 mm , the corresponding size of the dermal punch. Calculations are made using the following formula:

[Open area on day 8]−[Open area on day 1]/[Open area on day 1]

[1069] Specimens are fixed in 10% buffered formalin and paraffin embedded blocks are sectioned perpendicular to the wound surface (5 mm) and cut using a Reichert-Jung microtome. Routine hematoxylin-eosin (H&E) staining is performed on cross-sections of bisected wounds. Histologic examination of the wounds are used to assess whether the healing process and the morphologic appearance of the repaired skin is altered by treatment with an agonist or antagonist of the invention. This assessment included verification of the presence of cell accumulation, inflammatory cells, capillaries, fibroblasts, re-epithelialization and epidermal maturity (Greenhalgh, D. G. et al., Am. J. Pathol. 136:1235 (1990)). A calibrated lens micrometer is used by a blinded observer.

[1070] Tissue sections are also stained immunohistochemically with a polyclonal rabbit anti-human keratin antibody using ABC Elite detection system. Human skin is used as a positive tissue control while non-immune IgG is used as a negative control. Keratinocyte growth is determined by evaluating the extent of reepithelialization of the wound using a calibrated lens micrometer.

[1071] Proliferating cell nuclear antigen/cyclin (PCNA) in skin specimens is demonstrated by using anti-PCNA antibody (1:50) with an ABC Elite detection system. Human colon cancer served as a positive tissue control and human brain tissue is used as a negative tissue control. Each specimen included a section with omission of the primary antibody and substitution with non-immune mouse IgG. Ranking of these sections is based on the extent of proliferation on a scale of 0-8, the lower side of the scale reflecting slight proliferation to the higher side reflecting intense proliferation.

[1072] Experimental data are analyzed using an unpaired t test. A p value of <0.05 is considered significant.

[1073] B. Steroid Impaired Rat Model

[1074] The inhibition of wound healing by steroids has been well documented in various in vitro and in vivo systems (Wahl, Glucocorticoids and Wound healing. In: Anti-Inflammatory Steroid Action: Basic and Clinical Aspects. 280-302 (1989); Wahlet al., J. Immunol. 115: 476-481 (1975); Werb et al., J. Exp. Med. 147:1684-1694 (1978)). Glucocorticoids retard wound healing by inhibiting angiogenesis, decreasing vascular permeability (Ebert et al., An. Intern. Med. 37:701-705 (1952)), fibroblast proliferation, and collagen synthesis (Beck et al., Growth Factors. 5: 295-304 (1991); Haynes et al., J. Clin. Invest. 61: 703-797 (1978)) and producing a transient reduction of circulating monocytes (Haynes et al., J. Clin. Invest. 61: 703-797 (1978); Wahl, “Glucocorticoids and wound healing”, In: Antiinflammatory Steroid Action: Basic and Clinical Aspects, Academic Press, New York, pp. 280-302 (1989)). The systemic administration of steroids to impaired wound healing is a well establish phenomenon in rats (Beck et al., Growth Factors. 5: 295-304 (1991); Haynes et al., J. Clin. Invest. 61: 703-797 (1978); Wahl, “Glucocorticoids and wound healing”, In: Antiinflammatory Steroid Action: Basic and Clinical Aspects, Academic Press, New York, pp. 280-302 (1989); Pierce et al., Proc. Natl. Acad. Sci. USA 86: 2229-2233 (1989)).

[1075] To demonstrate that an agonist or antagonist of the invention can accelerate the healing process, the effects of multiple topical applications of the agonist or antagonist on full thickness excisional skin wounds in rats in which healing has been impaired by the systemic administration of methylprednisolone is assessed.

[1076] Young adult male Sprague Dawley rats weighing 250-300 g (Charles River Laboratories) are used in this example. The animals are purchased at 8 weeks of age and are 9 weeks old at the beginning of the study. The healing response of rats is impaired by the systemic administration of methylprednisolone (17 mg/kg/rat intramuscularly) at the time of wounding. Animals are individually housed and received food and water ad libitum. All manipulations are performed using aseptic techniques. This study is conducted according to the rules and guidelines of Human Genome Sciences, Inc. Institutional Animal Care and Use Committee and the Guidelines for the Care and Use of Laboratory Animals.

[1077] The wounding protocol is followed according to section A, above. On the day of wounding, animals are anesthetized with an intramuscular injection of ketamine (50 mg/kg) and xylazine (5 mg/kg). The dorsal region of the animal is shaved and the skin washed with 70% ethanol and iodine solutions. The surgical area is dried with sterile gauze prior to wounding. An 8 mm full-thickness wound is created using a Keyes tissue punch. The wounds are left open for the duration of the experiment. Applications of the testing materials are given topically once a day for 7 consecutive days commencing on the day of wounding and subsequent to methylprednisolone administration. Prior to treatment, wounds are gently cleansed with sterile saline and gauze sponges.

[1078] Wounds are visually examined and photographed at a fixed distance at the day of wounding and at the end of treatment. Wound closure is determined by daily measurement on days 1-5 and on day 8. Wounds are measured horizontally and vertically using a calibrated Jameson caliper. Wounds are considered healed if granulation tissue is no longer visible and the wound is covered by a continuous epithelium.

[1079] The agonist or antagonist of the invention is administered using at a range different doses, from 4mg to 500mg per wound per day for 8 days in vehicle. Vehicle control groups received 50 mL of vehicle solution.

[1080] Animals are euthanized on day 8 with an intraperitoneal injection of sodium pentobarbital (300 mg/kg). The wounds and surrounding skin are then harvested for histology. Tissue specimens are placed in 10% neutral buffered formalin in tissue cassettes between biopsy sponges for further processing.

[1081] Four groups of 10 animals each (5 with methylprednisolone and 5 without glucocorticoid) are evaluated: 1) Untreated group 2) Vehicle placebo control 3) treated groups.

[1082] Wound closure is analyzed by measuring the area in the vertical and horizontal axis and obtaining the total area of the wound. Closure is then estimated by establishing the differences between the initial wound area (day 0) and that of post treatment (day 8). The wound area on day 1 is 64mm , the corresponding size of the dermal punch. Calculations are made using the following formula:

[Open area on day 8]−[Open area on day 1]/[Open area on day 1]

[1083] Specimens are fixed in 10% buffered formalin and paraffin embedded blocks are sectioned perpendicular to the wound surface (5 mm) and cut using an Olympus microtome. Routine hematoxylin-eosin (H&E) staining is performed on cross-sections of bisected wounds. Histologic examination of the wounds allows assessment of whether the healing process and the morphologic appearance of the repaired skin is improved by treatment with an agonist or antagonist of the invention. A calibrated lens micrometer is used by a blinded observer to determine the distance of the wound gap.

[1084] Experimental data are analyzed using an unpaired t test. A p value of <0.05 is considered significant.

[1085] The studies described in this example tested activity of agonists or antagonists of the invention. However, one skilled in the art could easily modify the exemplified studies to test the activity of polynucleotides or polypeptides of the invention (e.g., gene therapy).

### Example 28

### Lymphadema Animal Model

[1086] The purpose of this experimental approach is to create an appropriate and consistent lymphedema model for testing the therapeutic effects of an agonist or antagonist of the invention in lymphangiogenesis and re-establishment of the lymphatic circulatory system in the rat hind limb. Effectiveness is measured by swelling volume of the affected limb, quantification of the amount of lymphatic vasculature, total blood plasma protein, and histopathology. Acute lymphedema is observed for 7-10 days. Perhaps more importantly, the chronic progress of the edema is followed for up to 3-4 weeks.

[1087] Prior to beginning surgery, blood sample is drawn for protein concentration analysis. Male rats weighing approximately ˜350g are dosed with Pentobarbital. Subsequently, the right legs are shaved from knee to hip. The shaved area is swabbed with gauze soaked in 70% EtOH. Blood is drawn for serum total protein testing. Circumference and volumetric measurements are made prior to injecting dye into paws after marking 2 measurement levels (0.5 cm above heel, at mid-pt of dorsal paw). The intradermal dorsum of both right and left paws are injected with 0.05 ml of 1% Evan's Blue. Circumference and volumetric measurements are then made following injection of dye into paws.

[1088] Using the knee joint as a landmark, a mid-leg inguinal incision is made circumferentially allowing the femoral vessels to be located. Forceps and hemostats are used to dissect and separate the skin flaps. After locating the femoral vessels, the lymphatic vessel that runs along side and underneath the vessel(s) is located. The main lymphatic vessels in this area are then electrically coagulated or suture ligated.

[1089] Using a microscope, muscles in back of the leg (near the semitendinosis and adductors) are bluntly dissected. The popliteal lymph node is then located. The 2 proximal and 2 distal lymphatic vessels and distal blood supply of the popliteal node are then and ligated by suturing. The popliteal lymph node, and any accompanying adipose tissue, is then removed by cutting connective tissues.

[1090] Care is taken to control any mild bleeding resulting from this procedure. After lymphatics are occluded, the skin flaps are sealed by using liquid skin (Vetbond) (A J Buck). The separated skin edges are sealed to the underlying muscle tissue while leaving a gap of ˜0.5 cm around the leg. Skin also may be anchored by suturing to underlying muscle when necessary.

[1091] To avoid infection, animals are housed individually with mesh (no bedding). Recovering animals are checked daily through the optimal edematous peak, which typically occurred by day 5-7. The plateau edematous peak are then observed. To evaluate the intensity of the lymphedema, the circumference and volumes of 2 designated places on each paw before operation and daily for 7 days are measured. The effect plasma proteins on lymphedema is determined and whether protein analysis is a useful testing perimeter is also investigated. The weights of both control and edematous limbs are evaluated at 2 places. Analysis is performed in a blind manner.

[1092] Circumference Measurements: Under brief gas anesthetic to prevent limb movement, a cloth tape is used to measure limb circumference. Measurements are done at the ankle bone and dorsal paw by 2 different people then those 2 readings are averaged. Readings are taken from both control and edematous limbs.

[1093] Volumetric Measurements:

[1094] On the day of surgery, animals are anesthetized with Pentobarbital and are tested prior to surgery. For daily volumetrics animals are under brief halothane anesthetic (rapid immobilization and quick recovery), both legs are shaved and equally marked using waterproof marker on legs. Legs are first dipped in water, then dipped into instrument to each marked level then measured by Buxco edema software (Chen/Victor). Data is recorded by one person, while the other is dipping the limb to marked area.

[1095] Blood-plasma protein measurements:

[1096] Blood is drawn, spun, and serum separated prior to surgery and then at conclusion for total protein and Ca2+ comparison.

[1097] Limb Weight Comparison:

[1098] After drawing blood, the animal is prepared for tissue collection. The limbs are amputated using a quillitine, then both experimental and control legs are cut at the ligature and weighed. A second weighing is done as the tibio-cacaneal joint is disarticulated and the foot is weighed.

[1099] Histological Preparations:

[1100] The transverse muscle located behind the knee (popliteal) area is dissected and arranged in a metal mold, filled with freezeGel, dipped into cold methylbutane, placed into labeled sample bags at −80 EC until sectioning. Upon sectioning, the muscle is observed under fluorescent microscopy for lymphatics.

[1101] The studies described in this example tested activity of agonists or antagonists of the invention. However, one skilled in the art could easily modify the exemplified studies to test the activity of polynucleotides or polypeptides of the invention (e.g., gene therapy).

### Example 29

### Suppression of TNF alpha-induced Adhesion Molecule Expression by a Agonist or Antagonist of the Invention

[1102] The recruitment of lymphocytes to areas of inflammation and angiogenesis involves specific receptor-ligand interactions between cell surface adhesion molecules (CAMs) on lymphocytes and the vascular endothelium. The adhesion process, in both normal and pathological settings, follows a multi-step cascade that involves intercellular adhesion molecule-1 (ICAM-1), vascular cell adhesion molecule-1 (VCAM-1), and endothelial leukocyte adhesion molecule-1 (E-selectin) expression on endothelial cells (EC). The expression of these molecules and others on the vascular endothelium determines the efficiency with which leukocytes may adhere to the local vasculature and extravasate into the local tissue during the development of an inflammatory response. The local concentration of cytokines and growth factor participate in the modulation of the expression of these CAMs.

[1103] Tumor necrosis factor alpha (TNF-a), a potent proinflammatory cytokine, is a stimulator of all three CAMs on endothelial cells and may be involved in a wide variety of inflammatory responses, often resulting in a pathological outcome.

[1104] The potential of an agonist or antagonist of the invention to mediate a suppression of TNF-a induced CAM expression can be examined. A modified ELISA assay which uses ECs as a solid phase absorbent is employed to measure the amount of CAM expression on TNF-a treated ECs when co-stimulated with a member of the FGF family of proteins.

[1105] To perform the experiment, human umbilical vein endothelial cell (HUVEC) cultures are obtained from pooled cord harvests and maintained in growth medium (EGM-2; Clonetics, San Diego, Calif.) supplemented with 10% FCS and 1% penicillin/streptomycin in a 37 degree C humidified incubator containing 5% CO₂. HUVECs are seeded in 96-well plates at concentrations of 1×10⁴ cells/well in EGM medium at 37 degree C for 18-24 hrs or until confluent. The monolayers are subsequently washed 3 times with a serum-free solution of RPMI-1640 supplemented with 100 U/ml penicillin and 100 mg/ml streptomycin, and treated with a given cytokine and/or growth factor(s) for 24 h at 37 degree C. Following incubation, the cells are then evaluated for CAM expression.

[1106] Human Umbilical Vein Endothelial cells (HUVECs) are grown in a standard 96 well plate to confluence. Growth medium is removed from the cells and replaced with 90 ul of 199 Medium (10% FBS). Samples for testing and positive or negative controls are added to the plate in triplicate (in 10 ul volumes). Plates are incubated at 37 degree C for either 5 h (selectin and integrin expression) or 24 h (integrin expression only). Plates are aspirated to remove medium and 100 μl of 0.1% paraformaldehyde-PBS(with Ca++ and Mg++) is added to each well. Plates are held at 4° C. for 30 min.

[1107] Fixative is then removed from the wells and wells are washed IX with PBS(+Ca,Mg)+0.5% BSA and drained. Do not allow the wells to dry. Add 10 μl of diluted primary antibody to the test and control wells. Anti-ICAM-1-Biotin, Anti-VCAM-1-Biotin and Anti-E-selectin-Biotin are used at a concentration of 10 μg/ml (1:10 dilution of 0.1 mg/ml stock antibody). Cells are incubated at 37° C. for 30 min. in a humidified environment. Wells are washed ×3 with PBS(+Ca,Mg)+0.5% BSA.

[1108] Then add 20 μl of diluted ExtrAvidin-Alkaline Phosphotase (1:5,000 dilution) to each well and incubated at 37° C. for 30 min. Wells are washed ×3 with PBS(+Ca,Mg)+0.5% BSA. 1 tablet of p-Nitrophenol Phosphate pNPP is dissolved in 5 ml of glycine buffer (pH 10.4). 100 μl of pNPP substrate in glycine buffer is added to each test well. Standard wells in triplicate are prepared from the working dilution of the ExtrAvidin-Alkaline Phosphotase in glycine buffer: 1:5,000 (10⁰)>10^{-0.5}>10⁻¹>10^{-1.5}.5 μl of each dilution is added to triplicate wells and the resulting AP content in each well is 5.50 ng, 1.74 ng, 0.55 ng, 0.18 ng. 100 μl of pNNP reagent must then be added to each of the standard wells. The plate must be incubated at 37° C. for 4h. A volume of 50 μl of 3M NaOH is added to all wells. The results are quantified on a plate reader at 405 nm. The background subtraction option is used on blank wells filled with glycine buffer only. The template is set up to indicate the concentration of AP-conjugate in each standard well [5.50 ng; 1.74 ng; 0.55 ng; 0.18 ng]. Results are indicated as amount of bound AP-conjugate in each sample.

[1109] The studies described in this example tested activity of agonists or antagonists of the invention. However, one skilled in the art could easily modify the exemplified studies to test the activity of polynucleotides or polypeptides of the invention (e.g., gene therapy).

### Example 30

### Production Of Polypeptide of the Invention For High-Throughput Screening Assays

[1110] The following protocol produces a supernatant containing polypeptide of the present invention to be tested. This supernatant can then be used in the Screening Assays described in Examples 32-41.

[1111] First, dilute Poly-D-Lysine (644 587 Boehringer-Mannheim) stock solution (1 mg/ml in PBS) 1:20 in PBS (w/o calcium or magnesium 17-516F Biowhittaker) for a working solution of 50 ug/ml. Add 200 ul of this solution to each well (24 well plates) and incubate at RT for 20 minutes. Be sure to distribute the solution over each well (note: a 12-channel pipetter may be used with tips on every other channel). Aspirate off the Poly-D-Lysine solution and rinse with 1 ml PBS (Phosphate Buffered Saline). The PBS should remain in the well until just prior to plating the cells and plates may be poly-lysine coated in advance for up to two weeks.

[1112] Plate 293T cells (do not carry cells past P+20) at 2×10⁵ cells/well in 0.5 ml DMEM(Dulbecco's Modified Eagle Medium)(with 4.5 G/L glucose and L-glutamine (12-604F Biowhittaker))/10% heat inactivated FBS(14-503F Biowhittaker)/1× Penstrep(17-602E Biowhittaker). Let the cells grow overnight.

[1113] The next day, mix together in a sterile solution basin: 300 ul Lipofectamine (18324-012 Gibco/BRL) and 5 ml Optimem 1 (31985070 Gibco/BRL)/96-well plate. With a small volume multi-channel pipetter, aliquot approximately 2 ug of an expression vector containing a polynucleotide insert, produced by the methods described in Examples 8-10, into an appropriately labeled 96-well round bottom plate. With a multi-channel pipetter, add 50 ul of the Lipofectamine/Optimem I mixture to each well. Pipette up and down gently to mix. Incubate at RT 15-45 minutes. After about 20 minutes, use a multi-channel pipetter to add 150ul Optimem I to each well. As a control, one plate of vector DNA lacking an insert should be transfected with each set of transfections.

[1114] Preferably, the transfection should be performed by tag-teaming the following tasks. By tag-teaming, hands on time is cut in half, and the cells do not spend too much time on PBS. First, person A aspirates off the media from four 24-well plates of cells, and then person B rinses each well with 0.5-1 ml PBS. Person A then aspirates off PBS rinse, and person B, using a12-channel pipetter with tips on every other channel, adds the 200 ul of DNA/Lipofectamine/Optimem I complex to the odd wells first, then to the even wells, to each row on the 24-well plates. Incubate at 37 degree C for 6 hours.

[1115] While cells are incubating, prepare appropriate media, either 1%BSA in DMEM with 1× penstrep, or HGS CHO-5 media (116.6 mg/L of CaCl2 (anhyd); 0.00130 mg/L CuSO₄-5H₂O; 0.050 mg/L of Fe(NO₃)₃-9H₂O; 0.417 mg/L of FeSO₄-7H₂O; 311.80 mg/L of Kcl; 28.64 mg/L of MgCl₂; 48.84 mg/L of MgSO₄; 6995.50 mg/L of NaCl; 2400.0 mg/L of NaHCO₃; 62.50 mg/L of NaH₂PO₄-H₂O; 71.02 mg/L of Na₂HPO4; 0.4320 mg/L of ZnSO₄-7H₂O; 0.002 mg/L of Arachidonic Acid; 1.022 mg/L of Cholesterol; 0.070 mg/L of DL-alpha-Tocopherol-Acetate; 0.0520 mg/L of Linoleic Acid; 0.010 mg/L of Linolenic Acid; 0.010 mg/L of Myristic Acid; 0.010 mg/L of Oleic Acid; 0.010 mg/L of Palmitric Acid; 0.010 mg/L of Palmitic Acid; 100 mg/L of Pluronic F-68; 0.010 mg/L of Stearic Acid; 2.20 mg/L of Tween 80; 4551 mg/L of D-Glucose; 130.85 mg/ml of L-Alanine; 147.50 mg/ml of L-Arginine-HCL; 7.50 mg/ml of L-Asparagine-H₂O; 6.65 mg/ml of L-Aspartic Acid; 29.56 mg/ml of L-Cystine-2HCL-H₂O; 31.29 mg/ml of L-Cystine-2HCL; 7.35 mg/ml of L-Glutamic Acid; 365.0 mg/ml of L-Glutamine; 18.75 mg/ml of Glycine; 52.48 mg/ml of L-Histidine-HCL-H₂O; 106.97 mg/ml of L-Isoleucine; 111.45 mg/ml of L-Leucine; 163.75 mg/ml of L-Lysine HCL; 32.34 mg/ml of L-Methionine; 68.48 mg/ml of L-Phenylalainine; 40.0 mg/ml of L-Proline; 26.25 mg/ml of L-Serine; 101.05 mg/ml of L-Threonine; 19.22 mg/ml of L-Tryptophan; 91.79 mg/ml of L-Tryrosine-2Na-2H₂O; and 99.65 mg/ml of L-Valine; 0.0035 mg/L of Biotin; 3.24 mg/L of D-Ca Pantothenate; 11.78 mg/L of Choline Chloride; 4.65 mg/L of Folic Acid; 15.60 mg/L of i-Inositol; 3.02 mg/L of Niacinamide; 3.00 mg/L of Pyridoxal HCL; 0.031 mg/L of Pyridoxine HCL; 0.319 mg/L of Riboflavin; 3.17 mg/L of Thiamine HCL; 0.365 mg/L of Thymidine; 0.680 mg/L of Vitamin B₁₂; 25 mM of HEPES Buffer; 2.39 mg/L of Na Hypoxanthine; 0.105 mg/L of Lipoic Acid; 0.081 mg/L of Sodium Putrescine-2HCL; 55.0 mg/L of Sodium Pyruvate; 0.0067 mg/L of Sodium Selenite; 20 uM of Ethanolamine; 0.122 mg/L of Ferric Citrate; 41.70 mg/L of Methyl-B-Cyclodextrin complexed with Linoleic Acid; 33.33 mg/L of Methyl-B-Cyclodextrin complexed with Oleic Acid; 10 mg/L of Methyl-B-Cyclodextrin complexed with Retinal Acetate. Adjust osmolarity to 327 mOsm) with 2 mm glutamine and 1× penstrep. (BSA (81-068-3 Bayer) 100 gm dissolved in 1L DMEM for a 10% BSA stock solution). Filter the media and collect 50 ul for endotoxin assay in 15 ml polystyrene conical.

[1116] The transfection reaction is terminated, preferably by tag-teaming, at the end of the incubation period. Person A aspirates off the transfection media, while person B adds 1.5 ml appropriate media to each well. Incubate at 37 degree C for 45 or 72 hours depending on the media used: 1%BSA for 45 hours or CHO-5 for 72 hours.

[1117] On day four, using a 300 ul multichannel pipetter, aliquot 600 ul in one 1 ml deep well plate and the remaining supernatant into a 2 ml deep well. The supernatants from each well can then be used in the assays described in Examples 32-39.

[1118] It is specifically understood that when activity is obtained in any of the assays described below using a supernatant, the activity originates from either the polypeptide of the present invention directly (e.g., as a secreted protein) or by polypeptide of the present invention inducing expression of other proteins, which are then secreted into the supernatant. Thus, the invention further provides a method of identifying the protein in the supernatant characterized by an activity in a particular assay.

### Example 31

### Construction of GAS Reporter Construct

[1119] One signal transduction pathway involved in the differentiation and proliferation of cells is called the Jaks-STATs pathway. Activated proteins in the Jaks-STATs pathway bind to gamma activation site “GAS” elements or interferon-sensitive responsive element (“ISRE”), located in the promoter of many genes. The binding of a protein to these elements alter the expression of the associated gene.

[1120] GAS and ISRE elements are recognized by a class of transcription factors called Signal Transducers and Activators of Transcription, or “STATs.” There are six members of the STATs family. Stat1 and Stat3 are present in many cell types, as is Stat2 (as response to IFN-alpha is widespread). Stat4 is more restricted and is not in many cell types though it has been found in T helper class I, cells after treatment with IL-12. Stat5 was originally called mammary growth factor, but has been found at higher concentrations in other cells including myeloid cells. It can be activated in tissue culture cells by many cytokines.

[1121] The STATs are activated to translocate from the cytoplasm to the nucleus upon tyrosine phosphorylation by a set of kinases known as the Janus Kinase (“Jaks”) family. Jaks represent a distinct family of soluble tyrosine kinases and include Tyk2, Jak1, Jak2, and Jak3. These kinases display significant sequence similarity and are generally catalytically inactive in resting cells.

[1122] The Jaks are activated by a wide range of receptors summarized in the Table below. (Adapted from review by Schidler and Darnell, Ann. Rev. Biochem. 64:621-51 (1995).) A cytokine receptor family, capable of activating Jaks, is divided into two groups: (a) Class 1 includes receptors for IL-2, IL-3, IL-4, IL-6, IL-7, IL-9, IL-I 1, IL-12, IL-15, Epo, PRL, GH, G-CSF, GM-CSF, LIF, CNTF, and thrombopoietin; and (b) Class 2 includes IFN-a, IFN-g, and IL-10. The Class 1 receptors share a conserved cysteine motif (a set of four conserved cysteines and one tryptophan) and a WSXWS motif (a membrane proximal region encoding Trp-Ser-Xxx-Trp-Ser (SEQ ID NO:838)).

[1123] Thus, on binding of a ligand to a receptor, Jaks are activated, which in turn activate STATs, which then translocate and bind to GAS elements. This entire process is encompassed in the Jaks-STATs signal transduction pathway.

[1124] Therefore, activation of the Jaks-STATs pathway, reflected by the binding of the GAS or the ISRE element, can be used to indicate proteins involved in the proliferation and differentiation of cells. For example, growth factors and cytokines are known to activate the Jaks-STATs pathway. (See Table below.) Thus, by using GAS elements linked to reporter molecules, activators of the Jaks-STATs pathway can be identified.

| | JAKs | | | | | |
|---|---|---|---|---|---|---|
| Ligand | tyk2 | Jak1 | Jak2 | Jak3 | STATS | GAS(elements) or ISRE |
| IFN family | | | | | | |
| IFN-a/B | + | + | − | − | 1,2,3 | ISRE |
| IFN-g | | + | + | − | 1 | GAS (IRF1 > Lys6 > IFP) |
| I1-10 | + | ? | ? | − | 1,3 | |
| gp130 family | | | | | | |
| IL-6 (Pleiotrohic) | + | + | + | ? | 1,3 | GAS (IRF1 > Lys6 > IFP) |
| Il-11(Pleiotrohic) | ? | + | ? | ? | 1,3 | |
| OnM(Pleiotrohic) | ? | + | + | ? | 1,3 | |
| LIF(Pleiotrohic) | ? | + | + | ? | 1,3 | |
| CNTF(Pleiotrohic) | −/+ | + | + | ? | 1,3 | |
| G-CSF(Pleiotrohic) | ? | + | ? | ? | 1,3 | |
| IL-12(Pleiotrohic) | + | − | + | + | 1,3 | |
| g-C family | | | | | | |
| IL-2 (lymphocytes) | − | + | − | + | 1,3,5 | GAS |
| Il-4 (lymph/myeloid) | − | + | − | + | 6 | GAS (IRF1 = IFP |
| >> Ly6)(IgH) | | | | | | |
| IL-7 (lymphocytes) | − | + | − | + | 5 | GAS |
| IL-9 (lymphocytes) | − | + | − | + | 5 | GAS |
| IL-13 (lymphocyte) | − | + | ? | ? | 6 | GAS |
| IL-15 | ? | + | ? | + | 5 | GAS |
| gp140 family | | | | | | |
| IL-3 (myeloid) | − | − | + | − | 5 | GAS (IRF1 > IFP >> Ly6) |
| IL-5 (myeloid) | − | − | + | − | 5 | GAS |
| GM-CSF (myeloid) | − | − | + | − | 5 | GAS |
| Growth hormone family | | | | | | |
| GH | ? | − | + | − | 5 | |
| PRL | ? | +/− | + | − | 1,3,5 | |
| EPO | ? | − | + | − | 5 | GAS(B- |
| | | | | | | CAS > IRF1 = IFP >> Ly6) |
| Receptor Tyrosine Kinases | | | | | | |
| EGF | ? | + | + | − | 1,3 | GAS(IRF1) |
| PDGF | ? | + | + | − | 1,3 | |
| CSF-1 | ? | + | + | − | 1,3 | GAS (notIRF1) |

[1125] To construct a synthetic GAS containing promoter element, which is used in the Biological Assays described in Examples 33-34, a PCR based strategy is employed to generate a GAS-SV40 promoter sequence. The 5′ primer contains four tandem copies of the GAS binding site found in the IRF1 promoter and previously demonstrated to bind STATs upon induction with a range of cytokines (Rothman et al., Immunity 1:457-468 (1994).), although other GAS or ISRE elements can be used instead. The 5′ primer also contains 18 bp of sequence complementary to the SV40 early promoter sequence and is flanked with an XhoI site. The sequence of the 5′ primer is:

[1126] 5′:GCGCCTCGAGATTTCCCCGAAATCTAGATTTCCCCGAAATGATTTCCCCGAA ATGATTTCCCCGAAATATCTGCCATCTCAATTAG:3′ (SEQ ID NO:839).

[1127] The downstream primer is complementary to the SV40 promoter and is flanked with a Hind III site: 5′:GCGGCAAGCTTTTTGCAAAGCCTAGGC:3′ (SEQ ID NO:840).

[1128] PCR amplification is performed using the SV40 promoter template present in the B-gal:promoter plasmid obtained from Clontech. The resulting PCR fragment is digested with XhoI/Hind III and subcloned into BLSK2-. (Stratagene.) Sequencing with forward and reverse primers confirms that the insert contains the following sequence:

[1129] 5′:CTCGAGATTTCCCCGAAATCTAGATTTCCCCGAAATGATTTCCCCGAAATGA TTTCCCCGAAATATCTGCCATCTCAATTAGTCAGCAACCATAGTCCCGCCCCTA ACTCCGCCCATCCCGCCCCTAACTCCGCCCAGTTCCGCCCATTCTCCGCCCCAT GGCTGACTAATTTTTTTTATTTATGCAGAGGCCGAGGCCGCCTCGGCCTCTGAG CTATTCCAGAAGTAGTGAGGAGGCTTTTTTGGAGGCCTAGGCTTTTGCAAAAA GCTT:3′ (SEQ ID NO:841).

[1130] With this GAS promoter element linked to the SV40 promoter, a GAS:SEAP2 reporter construct is next engineered. Here, the reporter molecule is a secreted alkaline phosphatase, or “SEAP.” Clearly, however, any reporter molecule can be instead of SEAP, in this or in any of the other Examples. Well known reporter molecules that can be used instead of SEAP include chloramphenicol acetyltransferase (CAT), luciferase, alkaline phosphatase, B-galactosidase, green fluorescent protein (GFP), or any protein detectable by an antibody.

[1131] The above sequence confirmed synthetic GAS-SV40 promoter element is subcloned into the pSEAP-Promoter vector obtained from Clontech using HindIII and XhoI, effectively replacing the SV40 promoter with the amplified GAS:SV40 promoter element, to create the GAS-SEAP vector. However, this vector does not contain a neomycin resistance gene, and therefore, is not preferred for mammalian expression systems.

[1132] Thus, in order to generate mammalian stable cell lines expressing the GAS-SEAP reporter, the GAS-SEAP cassette is removed from the GAS-SEAP vector using SalI and NotI, and inserted into a backbone vector containing the neomycin resistance gene, such as pGFP-1 (Clontech), using these restriction sites in the multiple cloning site, to create the GAS-SEAP/Neo vector. Once this vector is transfected into mammalian cells, this vector can then be used as a reporter molecule for GAS binding as described in Examples 33-34.

[1133] Other constructs can be made using the above description and replacing GAS with a different promoter sequence. For example, construction of reporter molecules containing NFK-B and EGR promoter sequences are described in Examples 34 and 35. However, many other promoters can be substituted using the protocols described in these Examples. For instance, SRE, IL-2, NFAT, or Osteocalcin promoters can be substituted, alone or in combination (e.g., GAS/NF-KB/EGR, GAS/NF-KB, I1-2/NFAT, or NF-KB/GAS). Similarly, other cell lines can be used to test reporter construct activity, such as HELA (epithelial), HUVEC (endothelial), Reh (B-cell), Saos-2 (osteoblast), HUVAC (aortic), or Cardiomyocyte.

### Example 32

### High-Throughput Screening Assay for T-cell Activity.

[1134] The following protocol is used to assess T-cell activity by identifying factors, and determining whether supernate containing a polypeptide of the invention proliferates and/or differentiates T-cells. T-cell activity is assessed using the GAS/SEAP/Neo construct produced in Example 31. Thus, factors that increase SEAP activity indicate the ability to activate the Jaks-STATS signal transduction pathway. The T-cell used in this assay is Jurkat T-cells (ATCC Accession No. TIB-152), although Molt-3 cells (ATCC Accession No. CRL-1552) and Molt-4 cells (ATCC Accession No. CRL-1582) cells can also be used.

[1135] Jurkat T-cells are lymphoblastic CD4+ Th1 helper cells. In order to generate stable cell lines, approximately 2 million Jurkat cells are transfected with the GAS-SEAP/neo vector using DMRIE-C (Life Technologies)(transfection procedure described below). The transfected cells are seeded to a density of approximately 20,000 cells per well and transfectants resistant to 1 mg/ml genticin selected. Resistant colonies are expanded and then tested for their response to increasing concentrations of interferon gamma. The dose response of a selected clone is demonstrated.

[1136] Specifically, the following protocol will yield sufficient cells for 75 wells containing 200 ul of cells. Thus, it is either scaled up, or performed in multiple to generate sufficient cells for multiple 96 well plates. Jurkat cells are maintained in RPM+10% serum with 1%Pen-Strep. Combine 2.5 m/s of OPTI-MEM (Life Technologies) with 10 ug of plasmid DNA in a T25 flask. Add 2.5 ml OPTI-MEM containing 50 ul of DMRIE-C and incubate at room temperature for 15-45 mins.

[1137] During the incubation period, count cell concentration, spin down the required number of cells (10⁷ per transfection), and resuspend in OPTI-MEM to a final concentration of 10⁷ cells/ml. Then add 1 ml of 1×10⁷ cells in OPTI-MEM to T25 flask and incubate at 37 degree C for 6 hrs. After the incubation, add 10 ml of RPMI+15% serum.

[1138] The Jurkat:GAS-SEAP stable reporter lines are maintained in RPMI+10% serum, 1 mg/ml Genticin, and 1% Pen-Strep. These cells are treated with supernatants containing polypeptide of the present invention or polypeptide of the present invention induced polypeptides as produced by the protocol described in Example 30.

[1139] On the day of treatment with the supernatant, the cells should be washed and resuspended in fresh RPMI+10% serum to a density of 500,000 cells per ml. The exact number of cells required will depend on the number of supernatants being screened. For one 96 well plate, approximately 10 million cells (for 10 plates, 100 million cells) are required.

[1140] Transfer the cells to a triangular reservoir boat, in order to dispense the cells into a 96 well dish, using a 12 channel pipette. Using a 12 channel pipette, transfer 200 ul of cells into each well (therefore adding 100,000 cells per well).

[1141] After all the plates have been seeded, 50 ul of the supernatants are transferred directly from the 96 well plate containing the supernatants into each well using a 12 channel pipette. In addition, a dose of exogenous interferon gamma (0.1, 1.0, 10 ng) is added to wells H9, H10, and H11 to serve as additional positive controls for the assay.

[1142] The 96 well dishes containing Jurkat cells treated with supernatants are placed in an incubator for 48 hrs (note: this time is variable between 48-72 hrs). 35 ul samples from each well are then transferred to an opaque 96 well plate using a 12 channel pipette. The opaque plates should be covered (using sellophene covers) and stored at −20 degree C until SEAP assays are performed according to Example 36. The plates containing the remaining treated cells are placed at 4 degree C and serve as a source of material for repeating the assay on a specific well if desired.

[1143] As a positive control, 100 Unit/ml interferon gamma can be used which is known to activate Jurkat T cells. Over 30 fold induction is typically observed in the positive control wells.

[1144] The above protocol may be used in the generation of both transient, as well as, stable transfected cells, which would be apparent to those of skill in the art.

### Example 33

### High-Throughput Screening Assay Identifying Myeloid Activity

[1145] The following protocol is used to assess myeloid activity of polypeptide of the present invention by determining whether polypeptide of the present invention proliferates and/or differentiates myeloid cells. Myeloid cell activity is assessed using the GAS/SEAP/Neo construct produced in Example 31. Thus, factors that increase SEAP activity indicate the ability to activate the Jaks-STATS signal transduction pathway. The myeloid cell used in this assay is U937, a pre-monocyte cell line, although TF-1, HL60, or KG1 can be used.

[1146] To transiently transfect U937 cells with the GAS/SEAP/Neo construct produced in Example 31, a DEAE-Dextran method (Kharbanda et. al., 1994, Cell Growth & Differentiation, 5:259-265) is used. First, harvest 2×10⁷ U937 cells and wash with PBS. The U937 cells are usually grown in RPMI 1640 medium containing 10% heat-inactivated fetal bovine serum (FBS) supplemented with 100 units/ml penicillin and 100 mg/ml streptomycin.

[1147] Next, suspend the cells in 1 ml of 20 mM Tris-HCl (pH 7.4) buffer containing 0.5 mg/ml DEAE-Dextran, 8 ug GAS-SEAP2 plasmid DNA, 140 mM NaCl, 5 mM KCl, 375 uM Na₂HPO₄.7H₂O, 1 mM MgCl₂, and 675 uM CaCl₂. Incubate at 37 degrees C for 45 min.

[1148] Wash the cells with RPMI 1640 medium containing 10% FBS and then resuspend in 10 ml complete medium and incubate at 37 degree C for 36 hr.

[1149] The GAS-SEAP/U937 stable cells are obtained by growing the cells in 400 ug/ml G418. The G418-free medium is used for routine growth but every one to two months, the cells should be re-grown in 400 ug/ml G418 for couple of passages.

[1150] These cells are tested by harvesting 1×10 cells (this is enough for ten 96-well plates assay) and wash with PBS. Suspend the cells in 200 ml above described growth medium, with a final density of 5×10⁵ cells/ml. Plate 200 ul cells per well in the 96-well plate (or 1×10⁵ cells/well).

[1151] Add 50 ul of the supernatant prepared by the protocol described in Example 30. Incubate at 37 degee C for 48 to 72 hr. As a positive control, 100 Unit/ml interferon gamma can be used which is known to activate U937 cells. Over 30 fold induction is typically observed in the positive control wells. SEAP assay the supernatant according to the protocol described in Example 36.

### Example 34

### High-Throughput Screening Assay Identifying Neuronal Activity

[1152] When cells undergo differentiation and proliferation, a group of genes are activated through many different signal transduction pathways. One of these genes, EGR1 (early growth response gene 1), is induced in various tissues and cell types upon activation. The promoter of EGR1 is responsible for such induction. Using the EGR1 promoter linked to reporter molecules, activation of cells can be assessed by polypeptide of the present invention.

[1153] Particularly, the following protocol is used to assess neuronal activity in PC12 cell lines. PC12 cells (rat phenochromocytoma cells) are known to proliferate and/or differentiate by activation with a number of mitogens, such as TPA (tetradecanoyl phorbol acetate), NGF (nerve growth factor), and EGF (epidermal growth factor). The EGR1 gene expression is activated during this treatment. Thus, by stably transfecting PC12 cells with a construct containing an EGR promoter linked to SEAP reporter, activation of PC12 cells by polypeptide of the present invention can be assessed.

[1154] The EGR/SEAP reporter construct can be assembled by the following protocol. The EGR-1 promoter sequence (-633 to +1)(Sakamoto K et al., Oncogene 6:867-871 (1991)) can be PCR amplified from human genomic DNA using the following primers:

[1155] 5′ GCGCTCGAGGGATGACAGCGATAGAACCCCGG-3′ (SEQ ID NO:842)

[1156] and

[1157] 5′ GCGAAGCTTCGCGACTCCCCGGATCCGCCTC-3′ (SEQ ID NO:843).

[1158] Using the GAS:SEAP/Neo vector produced in Example 31, EGR1 amplified product can then be inserted into this vector. Linearize the GAS:SEAP/Neo vector using restriction enzymes XhoI/HindIII, removing the GAS/SV40 stuffer. Restrict the EGR1 amplified product with these same enzymes. Ligate the vector and the EGR1 promoter.

[1159] To prepare 96 well-plates for cell culture, two Mlles of a coating solution (1:30 dilution of collagen type I (Upstate Biotech Inc. Cat#08-115) in 30% ethanol (filter sterilized)) is added per one 10 cm plate or 50 ml per well of the 96-well plate, and allowed to air dry for 2 hr.

[1160] PC12 cells are routinely grown in RPMI-1640 medium (Bio Whittaker) containing 10% horse serum (JRH BIOSCIENCES, Cat. # 12449-78P), 5% heat-inactivated fetal bovine serum (FBS) supplemented with 100 units/ml penicillin and 100 ug/ml streptomycin on a precoated 10 cm tissue culture dish. One to four split is done every three to four days. Cells are removed from the plates by scraping and resuspended with pipetting up and down for more than 15 times.

[1161] Transfect the EGR/SEAP/Neo construct into PC12 using the Lipofectamine protocol described in Example 30. EGR-SEAP/PC12 stable cells are obtained by growing the cells in 300 ug/ml G418. The G418-free medium is used for routine growth but every one to two months, the cells should be re-grown in 300 ug/ml G418 for couple of passages.

[1162] To assay for neuronal activity, a 10 cm plate with cells around 70 to 80% confluent is screened by removing the old medium. Wash the cells once with PBS (Phosphate buffered saline). Then starve the cells in low serum medium (RPMI-1640 containing 1% horse serum and 0.5% FBS with antibiotics) overnight.

[1163] The next morning, remove the medium and wash the cells with PBS. Scrape off the cells from the plate, suspend the cells well in 2 ml low serum medium. Count the cell number and add more low serum medium to reach final cell density as 5×10⁵ cells/ml.

[1164] Add 200 ul of the cell suspension to each well of 96-well plate (equivalent to 1×10⁵ cells/well). Add 50 ul supernatant produced by Example 30, 37 degree C for 48 to 72 hr. As a positive control, a growth factor known to activate PC12 cells through EGR can be used, such as 50 ng/ul of Neuronal Growth Factor (NGF). Over fifty-fold induction of SEAP is typically seen in the positive control wells. SEAP assay the supernatant according to Example 36.

### Example 35

### High-Throughput Screening Assay for T-cell Activity

[1165] NF-KB (Nuclear Factor KB) is a transcription factor activated by a wide variety of agents including the inflammatory cytokines IL-1 and TNF, CD30 and CD40, lymphotoxin-alpha and lymphotoxin-beta, by exposure to LPS or thrombin, and by expression of certain viral gene products. As a transcription factor, NF-KB regulates the expression of genes involved in immune cell activation, control of apoptosis (NF-KB appears to shield cells from apoptosis), B and T-cell development, anti-viral and antimicrobial responses, and multiple stress responses.

[1166] In non-stimulated conditions, NF-KB is retained in the cytoplasm with I-KB (Inhibitor KB). However, upon stimulation, I-KB is phosphorylated and degraded, causing NF-KB to shuttle to the nucleus, thereby activating transcription of target genes. Target genes activated by NF-KB include IL-2, IL-6, GM-CSF, ICAM-1 and class 1 MHC.

[1167] Due to its central role and ability to respond to a range of stimuli, reporter constructs utilizing the NF-KB promoter element are used to screen the supernatants produced in Example 30. Activators or inhibitors of NF-KB would be useful in treating, preventing, and/or diagnosing diseases. For example, inhibitors of NF-KB could be used to treat those diseases related to the acute or chronic activation of NF-KB, such as rheumatoid arthritis.

[1168] To construct a vector containing the NF-KB promoter element, a PCR based strategy is employed. The upstream primer contains four tandem copies of the NF-KB binding site (GGGGACTTTCCC) (SEQ ID NO:844), 18 bp of sequence complementary to the 5′ end of the SV40 early promoter sequence, and is flanked with an XhoI site:

[1169] 5′:GCGGCCTCGAGGGGACTTTCCCGGGGACTTTCCGGGGACTTTCCGGGACTTT CCATCCTGCCATCTCAATTAG:3′ (SEQ ID NO:845).

[1170] The downstream primer is complementary to the 3′ end of the SV40 promoter and is flanked with a Hind III site:

[1171] 5′ :GCGGCAAGCTTTTTGCAAAGCCTAGGC:3′ (SEQ ID NO:840).

[1172] PCR amplification is performed using the SV40 promoter template present in the pB-gal:promoter plasmid obtained from Clontech. The resulting PCR fragment is digested with XhoI and Hind III and subcloned into BLSK2-. (Stratagene) Sequencing with the T7 and T3 primers confirms the insert contains the following sequence:

[1173] 5′ :CTCGAGGGGACTTTCCCGGGGACTTTCCGGGGACTTTCCGGGACTTTCCATC TGCCATCTCAATTAGTCAGCAACCATAGTCCCGCCCCTAACTCCGCCCATCCC GCCCCTAACTCCGCCCAGTTCCGCCCATTCTCCGCCCCATGGCTGACTAATTTT TTTTATTTATGCAGAGGCCGAGGCCGCCTCGGCCTCTGAGCTATTCCAGAAGT AGTGAGGAGGCTTTTTTGGAGGCCTAGGCTTTTGCAAAAAGCTT:3′ (SEQ ID NO:846).

[1174] Next, replace the SV40 minimal promoter element present in the pSEAP2-promoter plasmid (Clontech) with this NF-KB/SV40 fragment using XhoI and HindIII. However, this vector does not contain a neomycin resistance gene, and therefore, is not preferred for mammalian expression systems.

[1175] In order to generate stable mammalian cell lines, the NF-KB/SV40/SEAP cassette is removed from the above NF-KB/SEAP vector using restriction enzymes SalI and NotI, and inserted into a vector containing neomycin resistance. Particularly, the NF-KB/SV40/SEAP cassette was inserted into pGFP-1 (Clontech), replacing the GFP gene, after restricting pGFP-1 with SalI and NotI.

[1176] Once NF-KB/SV40/SEAP/Neo vector is created, stable Jurkat T-cells are created and maintained according to the protocol described in Example 32. Similarly, the method for assaying supernatants with these stable Jurkat T-cells is also described in Example 32. As a positive control, exogenous TNF alpha (0.1, 1, 10 ng) is added to wells H9, H10, and H11, with a 5-10 fold activation typically observed.

### Example 36

### Assay for SEAP Activity

[1177] As a reporter molecule for the assays described in Examples 32-35, SEAP activity is assayed using the Tropix Phospho-light Kit (Cat. BP-400) according to the following general procedure. The Tropix Phospho-light Kit supplies the Dilution, Assay, and Reaction Buffers used below.

[1178] Prime a dispenser with the 2.5× Dilution Buffer and dispense 15 ul of 2.5× dilution buffer into Optiplates containing 35 ul of a supernatant. Seal the plates with a plastic sealer and incubate at 65 degree C for 30 min. Separate the Optiplates to avoid uneven heating.

[1179] Cool the samples to room temperature for 15 minutes. Empty the dispenser and prime with the Assay Buffer. Add 50 ml Assay Buffer and incubate at room temperature 5 min. Empty the dispenser and prime with the Reaction Buffer (see the table below). Add 50 ul Reaction Buffer and incubate at room temperature for 20 minutes. Since the intensity of the chemiluminescent signal is time dependent, and it takes about 10 minutes to read 5 plates on luminometer, one should treat 5 plates at each time and start the second set 10 minutes later.

[1180] Read the relative light unit in the luminometer. Set H12 as blank, and print the results. An increase in chemiluminescence indicates reporter activity.

[1181] Reaction Buffer Formulation:

| # of plates | Rxn buffer diluent (ml) | CSPD (ml) |
|---|---|---|
| 10 | 60 | 3 |
| 11 | 65 | 3.25 |
| 12 | 70 | 3.5 |
| 13 | 75 | 3.75 |
| 14 | 80 | 4 |
| 15 | 85 | 4.25 |
| 16 | 90 | 4.5 |
| 17 | 95 | 4.75 |
| 18 | 100 | 5 |
| 19 | 105 | 5.25 |
| 20 | 110 | 5.5 |
| 21 | 115 | 5.75 |
| 22 | 120 | 6 |
| 23 | 125 | 6.25 |
| 24 | 130 | 6.5 |
| 25 | 135 | 6.75 |
| 26 | 140 | 7 |
| 27 | 145 | 7.25 |
| 28 | 150 | 7.5 |
| 29 | 155 | 7.75 |
| 30 | 160 | 8 |
| 31 | 165 | 8.25 |
| 32 | 170 | 8.5 |
| 33 | 175 | 8.75 |
| 34 | 180 | 9 |
| 35 | 185 | 9.25 |
| 36 | 190 | 9.5 |
| 37 | 195 | 9.75 |
| 38 | 200 | 10 |
| 39 | 205 | 10.25 |
| 40 | 210 | 10.5 |
| 41 | 215 | 10.75 |
| 42 | 220 | 11 |
| 43 | 225 | 11.25 |
| 44 | 230 | 11.5 |
| 45 | 235 | 11.75 |
| 46 | 240 | 12 |
| 47 | 245 | 12.25 |
| 48 | 250 | 12.5 |
| 49 | 255 | 12.75 |
| 50 | 260 | 13 |

### Example 37

### High-Throughput Screening Assay Identifying Changes in Small Molecule Concentration and Membrane Permeability

[1182] Binding of a ligand to a receptor is known to alter intracellular levels of small molecules, such as calcium, potassium, sodium, and pH, as well as alter membrane potential. These alterations can be measured in an assay to identify supernatants which bind to receptors of a particular cell. Although the following protocol describes an assay for calcium, this protocol can easily be modified to detect changes in potassium, sodium, pH, membrane potential, or any other small molecule which is detectable by a fluorescent probe.

[1183] The following assay uses Fluorometric Imaging Plate Reader (“FLIPR”) to measure changes in fluorescent molecules (Molecular Probes) that bind small molecules. Clearly, any fluorescent molecule detecting a small molecule can be used instead of the calcium fluorescent molecule, fluo-4 (Molecular Probes, Inc.; catalog no. F-14202), used here.

[1184] For adherent cells, seed the cells at 10,000-20,000 cells/well in a Co-star black 96-well plate with clear bottom. The plate is incubated in a CO₂ incubator for 20 hours. The adherent cells are washed two times in Biotek washer with 200 ul of HBSS (Hank's Balanced Salt Solution) leaving 100 ul of buffer after the final wash.

[1185] A stock solution of 1 mg/ml fluo-4 is made in 10% pluronic acid DMSO. To load the cells with fluo-4, 50 ul of 12 ug/ml fluo-4 is added to each well. The plate is incubated at 37 degrees C in a CO₂ incubator for 60 min. The plate is washed four times in the Biotek washer with HBSS leaving 100 ul of buffer.

[1186] For non-adherent cells, the cells are spun down from culture media. Cells are re-suspended to 2-5×10⁶ cells/ml with HBSS in a 50-ml conical tube. 4 ul of 1 mg/ml fluo-4 solution in 10% pluronic acid DMSO is added to each ml of cell suspension. The tube is then placed in a 37 degrees C water bath for 30-60 min. The cells are washed twice with HBSS, resuspended to 1×10⁶ cells/ml, and dispensed into a microplate, 100 ul/well. The plate is centrifuged at 1000 rpm for 5 min. The plate is then washed once in Denley Cell Wash with 200 ul, followed by an aspiration step to 100 ul final volume.

[1187] For a non-cell based assay, each well contains a fluorescent molecule, such as fluo-4. The supernatant is added to the well, and a change in fluorescence is detected.

[1188] To measure the fluorescence of intracellular calcium, the FLIPR is set for the following parameters: (1) System gain is 300-800 mW; (2) Exposure time is 0.4 second; (3) Camera F/stop is F/2; (4) Excitation is 488 nm; (5) Emission is 530 nm; and (6) Sample addition is 50 ul. Increased emission at 530 nm indicates an extracellular signaling event caused by the a molecule, either polypeptide of the present invention or a molecule induced by polypeptide of the present invention, which has resulted in an increase in the intracellular Ca⁺⁺ concentration.

### Example 38

### High-Throughput Screening Assay Identifying Tyrosine Kinase Activity

[1189] The Protein Tyrosine Kinases (PTK) represent a diverse group of transmembrane and cytoplasmic kinases. Within the Receptor Protein Tyrosine Kinase RPTK) group are receptors for a range of mitogenic and metabolic growth factors including the PDGF, FGF, EGF, NGF, HGF and Insulin receptor subfamilies. In addition there are a large family of RPTKs for which the corresponding ligand is unknown. Ligands for RPTKs include mainly secreted small proteins, but also membrane-bound and extracellular matrix proteins.

[1190] Activation of RPTK by ligands involves ligand-mediated receptor dimerization, resulting in transphosphorylation of the receptor subunits and activation of the cytoplasmic tyrosine kinases. The cytoplasmic tyrosine kinases include receptor associated tyrosine kinases of the src-family (e.g., src, yes, lck, lyn, fyn) and non-receptor linked and cytosolic protein tyrosine kinases, such as the Jak family, members of which mediate signal transduction triggered by the cytokine superfamily of receptors (e.g., the Interleukins, Interferons, GM-CSF, and Leptin).

[1191] Because of the wide range of known factors capable of stimulating tyrosine kinase activity, identifying whether polypeptide of the present invention or a molecule induced by polypeptide of the present invention is capable of activating tyrosine kinase signal transduction pathways is of interest. Therefore, the following protocol is designed to identify such molecules capable of activating the tyrosine kinase signal transduction pathways.

[1192] Seed target cells (e.g., primary keratinocytes) at a density of approximately 25,000 cells per well in a 96 well Loprodyne Silent Screen Plates purchased from Nalge Nunc (Naperville, Ill.). The plates are sterilized with two 30 minute rinses with 100% ethanol, rinsed with water and dried overnight. Some plates are coated for 2 hr with 100 ml of cell culture grade type I collagen (50 mg/ml), gelatin (2%) or polylysine (50 mg/ml), all of which can be purchased from Sigma Chemicals (St. Louis, MO) or 10% Matrigel purchased from Becton Dickinson (Bedford, Mass.), or calf serum, rinsed with PBS and stored at 4 degree C. Cell growth on these plates is assayed by seeding 5,000 cells/well in growth medium and indirect quantitation of cell number through use of alamarBlue as described by the manufacturer Alamar Biosciences, Inc. (Sacramento, Calif.) after 48 hr. Falcon plate covers #3071 from Becton Dickinson (Bedford, Mass.) are used to cover the Loprodyne Silent Screen Plates. Falcon Microtest III cell culture plates can also be used in some proliferation experiments.

[1193] To prepare extracts, A431 cells are seeded onto the nylon membranes of Loprodyne plates (20,000/200 ml/well) and cultured overnight in complete medium. Cells are quiesced by incubation in serum-free basal medium for 24 hr. After 5-20 minutes treatment with EGF (60 ng/ml) or 50 ul of the supernatant produced in Example 31, the medium was removed and 100 ml of extraction buffer ((20 mM HEPES pH 7.5, 0.15 M NaCl, 1% Triton X-100, 0.1% SDS, 2 mM Na3VO4, 2 mM Na4P2O7 and a cocktail of protease inhibitors (# 1836170) obtained from Boeheringer Mannheim (Indianapolis, Ind.) is added to each well and the plate is shaken on a rotating shaker for 5 minutes at 4° C. The plate is then placed in a vacuum transfer manifold and the extract filtered through the 0.45 mm membrane bottoms of each well using house vacuum. Extracts are collected in a 96-well catch/assay plate in the bottom of the vacuum manifold and immediately placed on ice. To obtain extracts clarified by centrifugation, the content of each well, after detergent solubilization for 5 minutes, is removed and centrifuged for 15 minutes at 4 degree C at 16,000 ×g.

[1194] Test the filtered extracts for levels of tyrosine kinase activity. Although many methods of detecting tyrosine kinase activity are known, one method is described here.

[1195] Generally, the tyrosine kinase activity of a supernatant is evaluated by determining its ability to phosphorylate a tyrosine residue on a specific substrate (a biotinylated peptide). Biotinylated peptides that can be used for this purpose include PSK1 (corresponding to amino acids 6-20 of the cell division kinase cdc2-p34) and PSK2 (corresponding to amino acids 1-17 of gastrin). Both peptides are substrates for a range of tyrosine kinases and are available from Boehringer Mannheim.

[1196] The tyrosine kinase reaction is set up by adding the following components in order. First, add 10 ul of 5 uM Biotinylated Peptide, then 10 ul ATP/Mg₂₊ (5 mM ATP/50 mM MgCl₂), then 10 ul of 5× Assay Buffer (40 mM imidazole hydrochloride, pH7.3, 40 mM beta-glycerophosphate, 1 mM EGTA, 100 mM MgCl₂, 5 MM MnCl₂, 0.5 mg/ml BSA), then 5 ul of Sodium Vanadate (1 mM), and then 5 ul of water. Mix the components gently and preincubate the reaction mix at 30 degree C for 2 min. Initial the reaction by adding 10 ul of the control enzyme or the filtered supernatant.

[1197] The tyrosine kinase assay reaction is then terminated by adding 10 ul of 120 mm EDTA and place the reactions on ice.

[1198] Tyrosine kinase activity is determined by transferring 50 ul aliquot of reaction mixture to a microtiter plate (MTP) module and incubating at 37 degree C for 20 min. This allows the streptavadin coated 96 well plate to associate with the biotinylated peptide. Wash the MTP module with 300 ul/well of PBS four times. Next add 75 ul of anti-phospotyrosine antibody conjugated to horse radish peroxidase(anti-P-Tyr-POD (0.5 u/ml)) to each well and incubate at 37 degree C for one hour. Wash the well as above.

[1199] Next add 100 ul of peroxidase substrate solution (Boehringer Mannheim) and incubate at room temperature for at least 5 mins (up to 30 min). Measure the absorbance of the sample at 405 nm by using ELISA reader. The level of bound peroxidase activity is quantitated using an ELISA reader and reflects the level of tyrosine kinase activity.

### Example 39

### High-Throughput Screening Assay Identifying Phosphorylation Activity

[1200] As a potential alternative and/or compliment to the assay of protein tyrosine kinase activity described in Example 38, an assay which detects activation (phosphorylation) of major intracellular signal transduction intermediates can also be used. For example, as described below one particular assay can detect tyrosine phosphorylation of the Erk-1 and Erk-2 kinases. However, phosphorylation of other molecules, such as Raf, JNK, p38 MAP, Map kinase kinase (MEK), MEK kinase, Src, Muscle specific kinase (MuSK), IRAK, Tec, and Janus, as well as any other phosphoserine, phosphotyrosine, or phosphothreonine molecule, can be detected by substituting these molecules for Erk-1 or Erk-2 in the following assay.

[1201] Specifically, assay plates are made by coating the wells of a 96-well ELISA plate with 0.1 ml of protein G (1 ug/ml) for 2 hr at room temp, (RT). The plates are then rinsed with PBS and blocked with 3% BSA/PBS for 1 hr at RT. The protein G plates are then treated with 2 commercial monoclonal antibodies (100 ng/well) against Erk-1 and Erk-2 (1 hr at RT) (Santa Cruz Biotechnology). (To detect other molecules, this step can easily be modified by substituting a monoclonal antibody detecting any of the above described molecules.) After 3-5 rinses with PBS, the plates are stored at 4 degree C until use.

[1202] A431 cells are seeded at 20,000/well in a 96-well Loprodyne filterplate and cultured overnight in growth medium. The cells are then starved for 48 hr in basal medium (DMEM) and then treated with EGF (6ng/well) or 50 ul of the supernatants obtained in Example 30 for 5-20 minutes. The cells are then solubilized and extracts filtered directly into the assay plate.

[1203] After incubation with the extract for 1 hr at RT, the wells are again rinsed. As a positive control, a commercial preparation of MAP kinase (10 ng/well) is used in place of A431 extract. Plates are then treated with a commercial polyclonal (rabbit) antibody (lug/ml) which specifically recognizes the phosphorylated epitope of the Erk-1 and Erk-2 kinases (1 hr at RT). This antibody is biotinylated by standard procedures. The bound polyclonal antibody is then quantitated by successive incubations with Europium-streptavidin and Europium fluorescence enhancing reagent in the Wallac DELFIA instrument (time-resolved fluorescence). An increased fluorescent signal over background indicates a phosphorylation by polypeptide of the present invention or a molecule induced by polypeptide of the present invention.

### Example 40

### Assay for the Stimulation of Bone Marrow CD34+ Cell Proliferation

[1204] This assay is based on the ability of human CD34+ to proliferate in the presence of hematopoietic growth factors and evaluates the ability of isolated polypeptides expressed in mammalian cells to stimulate proliferation of CD34+ cells.

[1205] It has been previously shown that most mature precursors will respond to only a single signal. More immature precursors require at least two signals to respond. Therefore, to test the effect of polypeptides on hematopoietic activity of a wide range of progenitor cells, the assay contains a given polypeptide in the presence or absence of other hematopoietic growth factors. Isolated cells are cultured for 5 days in the presence of Stem Cell Factor (SCF) in combination with tested sample. SCF alone has a very limited effect on the proliferation of bone marrow (BM) cells, acting in such conditions only as a “survival” factor. However, combined with any factor exhibiting stimulatory effect on these cells (e.g., IL-3), SCF will cause a synergistic effect. Therefore, if the tested polypeptide has a stimulatory effect on a hematopoietic progenitors, such activity can be easily detected. Since normal BM cells have a low level of cycling cells, it is likely that any inhibitory effect of a given polypeptide, or agonists or antagonists thereof, might not be detected. Accordingly, assays for an inhibitory effect on progenitors is preferably tested in cells that are first subjected to in vitro stimulation with SCF+IL+3, and then contacted with the compound that is being evaluated for inhibition of such induced proliferation.

[1206] Briefly, CD34+ cells are isolated using methods known in the art. The cells are thawed and resuspended in medium (QBSF 60 serum-free medium with 1% L-glutamine (500 ml) Quality Biological, Inc., Gaithersburg, Md. Cat# 160-204-101). After several gentle centrifugation steps at 200 ×g, cells are allowed to rest for one hour. The cell count is adjusted to 2.5×10⁵ cells/ml. During this time, 100 μl of sterile water is added to the peripheral wells of a 96-well plate. The cytokines that can be tested with a given polypeptide in this assay is rhSCF (R&D Systems, Minneapolis, Minn., Cat# 255-SC) at 50 ng/ml alone and in combination with rhSCF and rhIL-3 (R&D Systems, Minneapolis, Minn., Cat# 203-ML) at 30 ng/ml. After one hour, 10 μl of prepared cytokines, 50 μl of the supernatants prepared in Example 30 (supernatants at 1:2 dilution=50 μl) and 20 μl of diluted cells are added to the media which is already present in the wells to allow for a final total volume of 100 μl. The plates are then placed in a 37° C/5% CO₂ incubator for five days.

[1207] Eighteen hours before the assay is harvested, 0.5 μCi/well of [3H] Thymidine is added in a 10 μl volume to each well to determine the proliferation rate. The experiment is terminated by harvesting the cells from each 96-well plate to a filtermat using the Tomtec Harvester 96. After harvesting, the filtermats are dried, trimmed and placed into OmniFilter assemblies consisting of one OmniFilter plate and one OmniFilter Tray. 60 μl Microscint is added to each well and the plate sealed with TopSeal-A press-on sealing film A bar code 15 sticker is affixed to the first plate for counting. The sealed plates is then loaded and the level of radioactivity determined via the Packard Top Count and the printed data collected for analysis. The level of radioactivity reflects the amount of cell proliferation.

[1208] The studies described in this example test the activity of a given polypeptide to stimulate bone marrow CD34+ cell proliferation. One skilled in the art could easily modify the exemplified studies to test the activity of polynucleotides (e.g., gene therapy), antibodies, agonists, and/or antagonists and fragments and variants thereof. As a nonlimiting example, potential antagonists tested in this assay would be expected to inhibit cell proliferation in the presence of cytokines and/or to increase the inhibition of cell proliferation in the presence of cytokines and a given polypeptide. In contrast, potential agonists tested in this assay would be expected to enhance cell proliferation and/or to decrease the inhibition of cell proliferation in the presence of cytokines and a given polypeptide.

[1209] The ability of a gene to stimulate the proliferation of bone marrow CD34+ cells indicates that polynucleotides and polypeptides corresponding to the gene are useful for the diagnosis and treatment of disorders affecting the immune system and hematopoiesis. Representative uses are described in the “Immune Activity” and “Infectious Disease” sections above, and elsewhere herein.

### Example 41

### Assay for Extracellular Matrix Enhanced Cell Response (EMECR)

[1210] The objective of the Extracellular Matrix Enhanced Cell Response (EMECR) assay is to identify gene products (e.g., isolated polypeptides) that act on the hematopoietic stem cells in the context of the extracellular matrix (ECM) induced signal.

[1211] Cells respond to the regulatory factors in the context of signal(s) received from the surrounding microenvironment. For example, fibroblasts, and endothelial and epithelial stem cells fail to replicate in the absence of signals from the ECM. Hematopoietic stem cells can undergo self-renewal in the bone marrow, but not in in vitro suspension culture. The ability of stem cells to undergo self-renewal in vitro is dependent upon their interaction with the stromal cells and the ECM protein fibronectin (fn). Adhesion of cells to fn is mediated by the α₅.β₁ and α₄._{β}₁ integrin receptors, which are expressed by human and mouse hematopoietic stem cells. The factor(s) which integrate with the ECM environment and responsible for stimulating stem cell self-renewal has not yet been identified. Discovery of such factors should be of great interest in gene therapy and bone marrow transplant applications

[1212] Briefly, polystyrene, non tissue culture treated, 96-well plates are coated with fn fragment at a coating concentration of 0.2 μg/cm². Mouse bone marrow cells are plated (1,000 cells/well ) in 0.2 ml of serum-free medium. Cells cultured in the presence of IL-3 (5 ng/ml )+SCF (50 ng/ml ) would serve as the positive control, conditions under which little self-renewal but pronounced differentiation of the stem cells is to be expected. Gene products of the invention (e.g., including, but not limited to, polynucleotides and polypeptides of the present invention, and supernatants produced in Example 30), are tested with appropriate negative controls in the presence and absence of SCF (5.0 ng/ml), where test factor supernates represent 10% of the total assay volume. The plated cells are then allowed to grow by incubating in a low oxygen environment (5% CO₂, 7% O₂, and 88% N₂) tissue culture incubator for 7 days. The number of proliferating cells within the wells is then quantitated by measuring thymidine incorporation into cellular DNA. Verification of the positive hits in the assay will require phenotypic characterization of the cells, which can be accomplished by scaling up of the culture system and using appropriate antibody reagents against cell surface antigens and FACScan.

[1213] One skilled in the art could easily modify the exemplified studies to test the activity of polynucleotides (e.g., gene therapy), antibodies, agonists, and/or antagonists and fragments and variants thereof.

[1214] If a particular polypeptide of the present invention is found to be a stimulator of hematopoietic progenitors, polynucleotides and polypeptides corresponding to the gene encoding said polypeptide may be useful for the diagnosis and treatment of disorders affecting the immune system and hematopoiesis. Representative uses are described in the “Immune Activity” and “Infectious Disease” sections above, and elsewhere herein. The gene product may also be useful in the expansion of stem cells and committed progenitors of various blood lineages, and in the differentiation and/or proliferation of various cell types.

[1215] Additionally, the polynucleotides and/or polypeptides of the gene of interest and/or agonists and/or antagonists thereof, may also be employed to inhibit the proliferation and differentiation of hematopoietic cells and therefore may be employed to protect bone marrow stem cells from chemotherapeutic agents during chemotherapy. This antiproliferative effect may allow administration of higher doses of chemotherapeutic agents and, therefore, more effective chemotherapeutic treatment.

[1216] Moreover, polynucleotides and polypeptides corresponding to the gene of interest may also be useful for the treatment and diagnosis of hematopoietic related disorders such as, for example, anemia, pancytopenia, leukopenia, thrombocytopenia or leukemia since stromal cells are important in the production of cells of hematopoietic lineages. The uses include bone marrow cell ex-vivo culture, bone marrow transplantation, bone marrow reconstitution, radiotherapy or chemotherapy of neoplasia.

### Example 42

### Human Dermal Fibroblast and Aortic Smooth Muscle Cell Proliferation

[1217] The polypeptide of interest is added to cultures of normal human dermal fibroblasts (NHDF) and human aortic smooth muscle cells (AOSMC) and two co-assays are performed with each sample. The first assay examines the effect of the polypeptide of interest on the proliferation of normal human dermal fibroblasts (NHDF) or aortic smooth muscle cells (AoSMC). Aberrant growth of fibroblasts or smooth muscle cells is a part of several pathological processes, including fibrosis, and restenosis. The second assay examines IL6 production by both NHDF and SMC. IL6 production is an indication of functional activation. Activated cells will have increased production of a number of cytokines and other factors, which can result in a proinflammatory or immunomodulatory outcome. Assays are run with and without co-TNFa stimulation, in order to check for costimulatory or inhibitory activity.

[1218] Briefly, on day 1, 96-well black plates are set up with 1000 cells/well (NHDF) or 2000 cells/well (AOSMC) in 100 μl culture media. NHDF culture media contains: Clonetics FB basal media, 1 mg/ml hFGF, 5 mg/ml insulin, 50 mg/ml gentamycin, 2%FBS, while AoSMC culture media contains Clonetics SM basal media, 0.5 μg/ml hEGF, 5mg/ml insulin, 1 μg/ml HFGF, 50 mg/ml gentamycin, 50 μg/ml Amphotericin B, 5%FBS. After incubation at 37° C. for at least 4-5 hours, culture media is aspirated and replaced with growth arrest media. Growth arrest media for NHDF contains fibroblast basal media, 50 mg/ml gentamycin, 2% FBS, while growth arrest media for AoSMC contains SM basal media, 50 mg/ml gentamycin, 50μg/ml Amphotericin B, 0.4% FBS. Incubate at 37° C. until day 2.

[1219] On day 2, serial dilutions and templates of the polypeptide of interest are designed such that they always include media controls and known-protein controls. For both stimulation and inhibition experiments, proteins are diluted in growth arrest media. For inhibition experiments, TNFa is added to a final concentration of 2 ng/ml (NHDF) or 5 ng/ml (AoSMC). Add ⅓ vol media containing controls or polypeptides of the present invention and incubate at 37° C./5% CO₂ until day 5.

[1220] Transfer 60 μl from each well to another labeled 96-well plate, cover with a plate-sealer, and store at 4° C. until Day 6 (for IL6 ELISA). To the remaining 100 μl in the cell culture plate, aseptically add Alamar Blue in an amount equal to 10% of the culture volume (10 μl). Return plates to incubator for 3 to 4 hours. Then measure fluorescence with excitation at 530 nm and emission at 590 nm using the CytoFluor. This yields the growth stimulation/inhibition data.

[1221] On day 5, the IL6 ELISA is performed by coating a 96 well plate with 50-100 ul/well of Anti-Human IL6 Monoclonal antibody diluted in PBS, pH 7.4, incubate ON at room temperature.

[1222] On day 6, empty the plates into the sink and blot on paper towels. Prepare Assay Buffer containing PBS with 4% BSA. Block the plates with 200 μl/well of Pierce Super Block blocking buffer in PBS for 1-2 hr and then wash plates with wash buffer (PBS, 0.05% Tween-20). Blot plates on paper towels. Then add 50 μl/well of diluted Anti-Human IL-6 Monoclonal, Biotin-labeled antibody at 0.50 mg/ml. Make dilutions of IL-6 stock in media (30, 10, 3, 1, 0.3, 0 ng/ml). Add duplicate samples to top row of plate. Cover the plates and incubate for 2 hours at RT on shaker. Plates are washed with wash buffer and blotted on paper towels. Dilute EU-labeled Streptavidin 1:1000 in Assay buffer, and add 100 μl/well. Cover the plate and incubate 1 h at RT. Plates are again washed with wash buffer and blotted on paper towels. Add 100 μl/well of Enhancement Solution and shake for 5 minutes. Read the plate on the Wallac DELFIA Fluorometer. Readings from triplicate samples in each assay are tabulated and averaged.

[1223] A positive result in this assay suggests AoSMC cell proliferation and that the polypeptide of the present invention may be involved in dermal fibroblast proliferation and/or smooth muscle cell proliferation. A positive result also suggests many potential uses of polypeptides, polynucleotides, agonists and/or antagonists of the polynucleotide/polypeptide of the present invention which gives a positive result. For example, inflammation and immune responses, wound healing, and angiogenesis, as detailed throughout this specification. Particularly, polypeptides of the present invention and polynucleotides of the present invention may be used in wound healing and dermal regeneration, as well as the promotion of vasculargenesis, both of the blood vessels and lymphatics. The growth of vessels can be used in the treatment of, for example, cardiovascular diseases. Additionally, antagonists of polypeptides and polynucleotides of the invention may be useful in treating diseases, disorders, and/or conditions which involve angiogenesis by acting as an anti-vascular (e.g., anti-angiogenesis). These diseases, disorders, and/or conditions are known in the art and/or are described herein, such as, for example, malignancies, solid tumors, benign tumors, for example hemangiomas, acoustic neuromas, neurofibromas, trachomas, and pyogenic granulomas; artheroscleric plaques; ocular angiogenic diseases, for example, diabetic retinopathy, retinopathy of prematurity, macular degeneration, corneal graft rejection, neovascular glaucoma, retrolental fibroplasia, rubeosis, retinoblastoma, uvietis and Pterygia (abnormal blood vessel growth) of the eye; rheumatoid arthritis; psoriasis; delayed wound healing; endometriosis; vasculogenesis; granulations; hypertrophic scars (keloids); nonunion fractures; scleroderma; trachoma; vascular adhesions; myocardial angiogenesis; coronary collaterals; cerebral collaterals; arteriovenous malformations; ischemic limb angiogenesis; Osler-Webber Syndrome; plaque neovascularization; telangiectasia; hemophiliac joints; angiofibroma; fibromuscular dysplasia; wound granulation; Crohn's disease; and atherosclerosis. Moreover, antagonists of polypeptides and polynucleotides of the invention may be useful in treating anti-hyperproliferative diseases and/or anti-inflammatory known in the art and/or described herein.

[1224] One skilled in the art could easily modify the exemplified studies to test the activity of polynucleotides (e.g., gene therapy), antibodies, agonists, and/or antagonists and fragments and variants thereof.

### Example 43

### Cellular Adhesion Molecule (CAM) Expression on Endothelial Cells

[1225] The recruitment of lymphocytes to areas of inflammation and angiogenesis involves specific receptor-ligand interactions between cell surface adhesion molecules (CAMs) on lymphocytes and the vascular endothelium. The adhesion process, in both normal and pathological settings, follows a multi-step cascade that involves intercellular adhesion molecule-1 (ICAM-1), vascular cell adhesion molecule-1 (VCAM-1), and endothelial leukocyte adhesion molecule-1 (E-selectin) expression on endothelial cells (EC). The expression of these molecules and others on the vascular endothelium determines the efficiency with which leukocytes may adhere to the local vasculature and extravasate into the local tissue during the development of an inflammatory response. The local concentration of cytokines and growth factor participate in the modulation of the expression of these CAMs.

[1226] Briefly, endothelial cells (e.g., Human Umbilical Vein Endothelial cells (HUVECs)) are grown in a standard 96 well plate to confluence, growth medium is removed from the cells and replaced with 100 μl of 199 Medium (10% fetal bovine serum (FBS)). Samples for testing and positive or negative controls are added to the plate in triplicate (in 10 μl volumes). Plates are then incubated at 37° C. for either 5 h (selectin and integrin expression) or 24 h (integrin expression only). Plates are aspirated to remove medium and 100 μl of 0.1% paraformaldehyde-PBS(with Ca++ and Mg++) is added to each well. Plates are held at 4° C. for 30 min. Fixative is removed from the wells and wells are washed 1× with PBS(+Ca,Mg)+0.5% BSA and drained. 10 μl of diluted primary antibody is added to the test and control wells. Anti-ICAM-1-Biotin, Anti-VCAM-1-Biotin and Anti-E-selectin-Biotin are used at a concentration of 10 μg/ml (1:10 dilution of 0.1 mg/ml stock antibody). Cells are incubated at 37° C. for 30 min. in a humidified environment. Wells are washed three times with PBS(+Ca,Mg)+0.5% BSA. 20 μl of diluted ExtrAvidin-Alkaline Phosphotase (1:5,000 dilution, refered to herein as the working dilution) are added to each well and incubated at 37° C. for 30 rain. Wells are washed three times with PBS(+Ca,Mg)+0.5% BSA. Dissolve 1 tablet of p-Nitrophenol Phosphate pNPP per 5 ml of glycine buffer (pH 10.4). 100 μl of pNPP substrate in glycine buffer is added to each test well. Standard wells in triplicate are prepared from the working dilution of the ExtrAvidin-Alkaline Phosphotase in glycine buffer: 1:5,000 (10⁰)>10^{-0.5}>10⁻¹>10^{-1.5}.5 μl of each dilution is added to triplicate wells and the resulting AP content in each well is 5.50 ng, 1.74 ng, 0.55 ng, 0.18 ng. 100 μl of pNNP reagent is then added to each of the standard wells. The plate is incubated at 37° C. for 4 h. A volume of 50 μl of 3M NaOH is added to all wells. The plate is read on a plate reader at 405 nm using the background subtraction option on blank wells filled with glycine buffer only. Additionally, the template is set up to indicate the concentration of AP-conjugate in each standard well [5.50 ng; 1.74 ng; 0.55 ng; 0.18 ng]. Results are indicated as amount of bound AP-conjugate in each sample.

### Example 44

### Alamar Blue Endothelial Cells Proliferation Assay

[1227] This assay may be used to quantitatively determine protein mediated inhibition of bFGF-induced proliferation of Bovine Lymphatic Endothelial Cells (LECs), Bovine Aortic Endothelial Cells (BAECs) or Human Microvascular Uterine Myometrial Cells (UTMECs). This assay incorporates a fluorometric growth indicator based on detection of metabolic activity. A standard Alamar Blue Proliferation Assay is prepared in EGM-2MV with 10 ng /ml of bFGF added as a source of endothelial cell stimulation. This assay may be used with a variety of endothelial cells with slight changes in growth medium and cell concentration. Dilutions of the protein batches to be tested are diluted as appropriate. Serum-free medium (GIBCO SFM) without bFGF is used as a non-stimulated control and Angiostatin or TSP-1 are included as a known inhibitory controls.

[1228] Briefly, LEC, BAECs or UTMECs are seeded in growth media at a density of 5000 to 2000 cells/well in a 96 well plate and placed at 37-C overnight. After the overnight incubation of the cells, the growth media is removed and replaced with GIBCO EC-SFM. The cells are treated with the appropriate dilutions of the protein of interest or control protein sample(s) (prepared in SFM ) in triplicate wells with additional bFGF to a concentration of 10 ng/ml. Once the cells have been treated with the samples, the plate(s) is/are placed back in the 37° C. incubator for three days. After three days 10 ml of stock alamar blue (Biosource Cat# DAL1100) is added to each well and the plate(s) is/are placed back in the 37° C. incubator for four hours. The plate(s) are then read at 530 nm excitation and 590 nm emission using the CytoFluor fluorescence reader. Direct output is recorded in relative fluorescence units.

[1229] Alamar blue is an oxidation-reduction indicator that both fluoresces and changes color in response to chemical reduction of growth medium resulting from cell growth. As cells grow in culture, innate metabolic activity results in a chemical reduction of the immediate surrounding environment. Reduction related to growth causes the indicator to change from oxidized (non-fluorescent blue) form to reduced (fluorescent red) form. i.e. stimulated proliferation will produce a stronger signal and inhibited proliferation will produce a weaker signal and the total signal is proportional to the total number of cells as well as their metabolic activity. The background level of activity is observed with the starvation medium alone. This is compared to the output observed from the positive control samples (bFGF in growth medium) and protein dilutions.

### Example 45

### Detection of Inhibition of a Mixed Lymphocyte Reaction

[1230] This assay can be used to detect and evaluate inhibition of a Mixed Lymphocyte Reaction (MLR) by gene products (e.g., isolated polypeptides). Inhibition of a MLR may be due to a direct effect on cell proliferation and viability, modulation of costimulatory molecules on interacting cells, modulation of adhesiveness between lymphocytes and accessory cells, or modulation of cytokine production by accessory cells. Multiple cells may be targeted by these polypeptides since the peripheral blood mononuclear fraction used in this assay includes T, B and natural killer lymphocytes, as well as monocytes and dendritic cells.

[1231] Polypeptides of interest found to inhibit the MLR may find application in diseases associated with lymphocyte and monocyte activation or proliferation. These include, but are not limited to, diseases such as asthma, arthritis, diabetes, inflammatory skin conditions, psoriasis, eczema, systemic lupus erythematosus, multiple sclerosis, glomerulonephritis, inflammatory bowel disease, crohn's disease, ulcerative colitis, arteriosclerosis, cirrhosis, graft vs. host disease, host vs. graft disease, hepatitis, leukemia and lymphoma.

[1232] Briefly, PBMCs from human donors are purified by density gradient centrifugation using Lymphocyte Separation Medium (LSM®, density 1.0770 g/ml, Organon Teknika Corporation, West Chester, Pa.). PBMCs from two donors are adjusted to 2×10⁶ cells/ml in RPMI-1640 (Life Technologies, Grand Island, N.Y.) supplemented with 10% FCS and 2 mM glutamine. PBMCs from a third donor is adjusted to 2×10⁵ cells/ml. Fifty microliters of PBMCs from each donor is added to wells of a 96-well round bottom microtiter plate. Dilutions of test materials (50 μl) is added in triplicate to microtiter wells. Test samples (of the protein of interest) are added for final dilution of 1:4; rhuIL-2 (R&D Systems, Minneapolis, Minn., catalog number 202-IL) is added to a final concentration of 1 μg/ml; anti-CD4 mAb (R&D Systems, clone 34930.11, catalog number MAB379) is added to a final concentration of 10 μg/ml. Cells are cultured for 7-8 days at 37° C. in 5% CO₂, and 1 μC of [³H] thymidine is added to wells for the last 16 hrs of culture. Cells are harvested and thymidine incorporation determined using a Packard TopCount. Data is expressed as the mean and standard deviation of triplicate determinations.

[1233] Samples of the protein of interest are screened in separate experiments and compared to the negative control treatment, anti-CD4 mAb, which inhibits proliferation of lymphocytes and the positive control treatment, IL-2 (either as recombinant material or supernatant), which enhances proliferation of lymphocytes.

[1234] One skilled in the art could easily modify the exemplified studies to test the activity of polynucleotides (e.g., gene therapy), antibodies, agonists, and/or antagonists and fragments and variants thereof.

[1235] It will be clear that the invention may be practiced otherwise than as particularly described in the foregoing description and examples. Numerous modifications and variations of the present invention are possible in light of the above teachings and, therefore, are within the scope of the appended claims.

[1236] The entire disclosure of each document cited (including patents, patent applications, journal articles, abstracts, laboratory manuals, books, or other disclosures) in the Background of the Invention, Detailed Description, and Examples is hereby incorporated herein by reference. Further, the paper copy on CD-ROM of the sequence listing submitted herewith and the corresponding computer readable form on CD-ROM are both incorporated herein by reference in their entireties. Moreover, the hard copy of and the corresponding computer readable form of the Sequence Listing of Serial No. 60/124,270 and International Application No. PCT/US00/05881 are also incorporated herein by reference in their entireties.

The application's sequence listing, which the Patent Office published only in electronic form, follows.

SEQUENCE LISTING (846 sequences)

SEQ ID NO: 1 - DNA, 1913 bp, Homo sapiens
  misc_feature (6): n equals a,t,g, or c
  misc_feature (944): n equals a,t,g, or c
  misc_feature (1418): n equals a,t,g, or c
  misc_feature (1908): n equals a,t,g, or c
ggtcanagactggttcctgtggtatgtgaagaagtgtggaggcacaacaagaatcatctcgacaacaaatggaggacaggagaggaaatttgtgggcggatctggtcaagtgagtgagcggataatggacctccttggagaccgagtgaagctggagaggcctgtgatctacattgaccagacaagagaaaatgtccttgtggagaccctaaaccatgagatgtatgaggctaaatatgtgattagtgctattcctcctactctgggcatgaagattcacttcaatccccctctgccaatgatgagaaaccagatgatcactcgtgtgcctttgggttcagtcatcaagtgtatagtttattataaagagcctttctggaggaaaaaggattactgtggaaccatgattattgatggagaagaagctccagttgcctacacgttggatgataccaaacctgaaggcaactatgctgccataatgggatttatcctggcccacaaagccagaaaactggcacgtcttaccaaagaggaaaggttgaagaaactttgtgaactctatgccaaggttctgggttccctagaagctctggagccagtgcattatgaagaaaagaactggtgtgaggagcagtactctgggggctgctacacaacttatttcccccctgggatcctgactcaatatggaagggttctacgccagccagtggacaggatttactttgcaggcaccgagactgccacacactggagcggctacatggagggggctgtagaggccggggagagagcagcccgagagatcctgcatgccatggggaagattccagaggatgaaatctggcagtcagaaccagagtctgtggatgtccctgcacagcccatcaccaccacctttttggagagacatttgccctccgtgccaggcctgctcaggntgattggattgaccaccatcttttcagcaacggctcttggcttcctggcccacaaaagggggctacttgtgagagtctaaagagagagggtgtctgtaatcacactctcttcttactgtatttgggatatgagtttggggaaagagttgcagtaaagttccatgaagacaaatagtgtggagtgaggcggggagcatgaagataaatccaactctgactgtaaaatacatggtatctctttctccgttgtggcccctgcttagtgtcccttacctggcttagcgttctgtttcaccagtttccaagtttattgccctcaaaatctttagaatagttaaattggcttgtttaaggttcttgctgccccacaacacaccttgcccatgcacaaggaatgaattttttcctaccattatggctttgtgcttgttcttcctcttacctgtaatagcctcaccttccctagttctttgncattcgtccttagaatactgtattgttacagctgaaagacagtaaagaccatttagtcctcaccttctgttttagagttgagcaaactgaagcccacagaggtggaacttaattacctaagagccacaataagccactggtatctgggggactagaacacaaatccaacgcttttcccacctctttggatgttttccccaattatcctccttcactccctgtcatagttaccgatggtgtcccgttgtgtgggtttactctgtgctaagttgtcttacacttctcaaatgctactcagtatatagccttaagtcttactgttttgtgcggtgtgtctccagctgattttaacttttttgatggtagaaattttatctcttcttccttttgtatcctccattgtatcttcatacaaaggacagtacacacttgggtaattaaaaataaaagttgattgaccataaaaaaaaaaaaagggggggccgcccanggggg

SEQ ID NO: 2 - DNA, 1425 bp, Homo sapiens
  misc_feature (790): n equals a,t,g, or c
  misc_feature (842): n equals a,t,g, or c
acttatttatcctgcttgaaagctacttgmgatgtgtactgctattctaaacacgtgatctagtttctttcatctctggcataagattatataacttaatgttaagtgtcttgmggcataaaagacaaaatgtggcttattttaggatctgttttttcatcgaggtctcgggtatcctttcaaagatagtgaraagcagacactgctccttgtgcagctctggtacctcctgcccactgctgtcacttcaagccactggcaatgcttctgtcctcgtgtcttggaggaaaatcacctggggggaggggacttcttgtggtaagagcaagtgcaggtatgaaatgcgaagattgccccagctaaaagtggacaagtccgctttgtgagatgaatacttcctgagaaacttgacaagtatctctccattttaccattatgaaaactatcattaaaaaaaacagtttagatgccttctccttttgagggaaaaagggtgctttttattgtataaagcagcgtcttatgtattttgatataccattgtttgaacttccgtctttagctgatagattctcaaatatccttgattttggatgttcagtatgtttgtgagagaggtttctgggaagactctctttttgccctcgggaaaaagcaaaatatcaatgtttgggtgactgtgtaaagctcagtgtgtaagaacatctttttgtctaggttttctttctgctctttattgaagacaaacactcaccaaaaagaaaaataaaagttttcagagaaactaatnttcyttgggcaagagtattacytaaatatttkggccyccyaaagttycccynagtwagtactcggacycctgtgctaattgtcagcytacatatcattgtatagagactgtttawtctgtaccaaactgatttcaaaagtactacattgaaaataaaccggtgactgtttttcttcataaagttctgcgtttggcatcttcactctttccaaaatgtatctgtacatcagaaatgtcactattccaagtgtctttttagtgtggctttagtatggcttccttttaatattgtacatacattgtatctttgttttatggtaataagtaataaaaatgtagacttcatattttgtacaaaatgtcctatgtacagaataaaaaagttcatagaaacagcaaatataggtaagtggcacaattatttttctttagaaaatatctgtaactttatgcattagtgaaatgttaagtaccgacatattttttaacattttgtaattcaaaactttttgttttgacattgtttatgaagagaaacttcatacacttgccatttaatatgctcttttatctaattttcaaaaactctaaaaaacggtgtatcatatggactaaataaagaacatgtgaatttt

SEQ ID NO: 3 - DNA, 354 bp, Homo sapiens
  misc_feature (246): n equals a,t,g, or c
ggcacgagaaccatttccactatatattccttcggataactaraaattaaawtatttggtgtattatttgcaaggagtcaaagatgatgtcttttcccagaggcatgaaccttagaaatgctttcgatggggatgtttctgtaacactgtgttattctggatcttcaaataatagcaaagccaattactctaaatgtaaaatttttctattcccaaggttcacttttgtttggtaggttttcacgnttttaaatactgtttaatggaagaaaaatacgtagccaggcgtggtggctcacacctgtagccccggaactttgggagactgaagcgggcagatcacgaggtcaggag

SEQ ID NO: 4 - DNA, 514 bp, Homo sapiens
  misc_feature (502): n equals a,t,g, or c
agacgcacgcgtactgctccaacctcagcttccgcctctacgaccagtggcgagcctggatgcagaagtcgcacaagacccgcaaccagcacaggacgaggggatcctgccctcgggcagacggggcacggcgagaggtcctgccagataagctgtaggggctcaggccaccctccctgccacgtggagacgcagaggccgaacccaaactggggccacctctgtaccctcacttcagggcacctgagccaccctcagcaggagctggggtggcccctgagctccaacggccataacagctctgactcccacgtgaggccacctttgggtgcaccccagtgggtgtgtgtgtgtgtgtgagggttggttgagttgcctagaacccctgccagggctgggggtgagaaggggagtcattactccccattacctagggcccctccaaaagagtccttttaaataaatgagctatttaggtgcwraaaaaaaaaaaaaaaaaccncggggggggccc

SEQ ID NO: 5 - DNA, 2035 bp, Homo sapiens
cacgaggaatgacatgaaagcagactgtattttgtactacggctttggagatatattcagaataagttcaatggtggtgatggaaaatgtgggacagcagaagctttatgagatggtatcatactgtcaaaacataagcaaatgtcgtcgtgtgttgatggctcaacattttgatgaagtatggaactcagaagcatgtaacaaaatgtgcgrtaactgctgtaaagacagtgcatttgaaagaaagaacataacagagtactgcagagatctaatcaagatcctgaagcaggcagagggamctggaatggaaaaactcactcccattggaaactggattgattcttggrtgggaaagggtgcagcaaaactgagagtagcaggtgttgtggctcccacacttcctcgtgaagatctggagaagattattgcacactttstaatacagcagtatcttaaagaagactacagttttacagcttatgctaccatttcgtatttgaaaataggacctaaagctaatcttctgaacaatgaggcacatgctattactatgcaagtgacaaagtccacgcagaactctttcagggctgaatcgtctcaaacttgtcattctgaacaaggtgataaaaagatggaggaaaaaaattcaggcaacttccagaagaaggctgcaaacatgcttcagcaatctggttctaagaatacaggagctaagaaaagaaaaatcgatgatgcctgatatgaatgttactaaattttctaattaaagatggtttatgcatgtatatgccattatttttgtagttagacaatagtttttaaaagaatttcatagatattttatatgtatggatctatattttcagagcttatctctgaagatctaaacttttgagaatgtttgaaaattagagatcatgaattatataattttccagtataaaacaagggaaaaatttttatgtaaaaccctttaaatgtaaaatatttgagaataagttcatacaatcgtcttaagttttttatgcctttatatacttagctatattttttcttttgacataactatctttttgaaagcaatattatactgacagaggctcactgagtgatactttaagttaaatatgtagatcaaggatgtccaatcttttggcttccctgagccacattggaagaagaattgtcttgggccgcacataaaatatgctaacactgatgatagctgatgagcttaaaaaaaaaattgcaagaaaaatctcatgttttaagaaagtttacaaaaaatgtaaaatatttgagaataagttcatgtaattgtcttaagttttttatgcctttatatacttagctatattttttcttttgacataaccatctttttgaaagcaatattatactgacagaggytcactgagtgatactttaagttaaatatgtagatcagggatgtccaatcttttggcttccctgagccacattggaagaagaattgtcttgggccgcacataaaatatgctaacactgacgatagctgatgagcttaaaaaaaaaaaaattgcaagaaaaatctcatgttttaagaaagtttacagatttgtgttgggctgcattcaaagctgttctgggctgcattagacccgtgggctagagttggacaagcttgtagatgatttcaggttataaaaccagaagtacaattcaacaaaaaaggagtaagtcatcaatataaatattagcaaacgagatattgctacatctctatttaaagtaaaatacaaccgattttaaagttcctgaaaccatagccatattttgacatttcacaaagaatggttctagtctactagagtacatttggctaagtagataacttacctaaatttgctccaaagctaaatcacaagtaaacatatttatgtttaaaacacagaaataaataacttaagatttttatctaagcggtcagtgttgtrttggaaagatatatctataaataaactttgaactgatttcaaacttaaaaaaaaaa

SEQ ID NO: 6 - DNA, 1196 bp, Homo sapiens
  misc_feature (157): n equals a,t,g, or c
  misc_feature (998): n equals a,t,g, or c
ggtgggtgtgggactgggggctgtgagtgtgagtgtgtgcaagagattgctctgcatgtttgctgagggctggagctgggcttttcagagatcgggcatccctggtctctcagggccagttggaggttcccaggaggcatgttcttgatgcctgtgntgcctgaatccaattaactgaattctgaagagtgcatggggtaactgtctcagcctttctcctgtctctgcctctgtcctctgctccaaatcataaaatctcagagctagaagcactttcaagatcattccatccagcgcattcaatttgcaagtttaggcgttgagttccagagagggatggtagcttgctgaggtcccagtcaagcacacttgccattgcctcagctttcccctaaacacggtgtctgtggtcagggttggtgaggaggagctttcctgttttgcctctccttcttcccattggctacacccatctytggccctgctgataccgattcccctgacatttcaggctaaagccagcaggraagggctagggacgggtgcctgggaagcccacatggagggagttgggcaagatttgattcggagcaggtgtcaagacgtgttggggaaactgaggcccagtggaatagaagccagtagaggaggaatctagaggcctcctagattaaggcctgcctggaatggattgggggtgggtctttggaaaaggaggggacccacctctagcccagtctctcaactgcccctcctttacagtgagtgagatcattggccgagacctgagtggcttccctgcacctcctggagaagagcctcctgcctgaaccacgtgaactgtcatcacctggcaaccccagccccagcctcagccctgccccctttccctccttcctggagtggtggctacagaagcttggggccaaccctggctcctctttccccagcttctgtctgtctcactgtcttccctcccctcccccagctgaggtgtngccctcaggcctggtgctgccttggagggctgggggaaggagtgtgtggaggagggaggagggtgaagactgaggctaggtgccagaatggactggagtgaaggcgtgtctagagtgtgggctggctgttgtgctggaaagctggggacaggttgatggtaataaactgctcaatgaccagtgaaaaaaaaaaaaaaa

SEQ ID NO: 7 - DNA, 624 bp, Homo sapiens
attattttcaagtcaaaatttccagtaaggatttactttacatttcatttggataaatgaatcattatataggtatgtctttgcttccattttgagacatttagatttttacagcctgtttctatagcatttgatgttacaactctaagcgtagttcaaagacatttaaattgacaagttaccagttaaagaatttagaatatattagatcccatctagtattatatattttttctagttgatcattgagcagtaaataccaaatactcgattagaaggtaatttttacattgttttgaaagggtgaamcaatttatctcctctggtattattcttaaaccacagatagggatagtagggtagtgaaacgmataaatacctggtagaagacaagagacttgggctctacacctggctctgcactgatttgctaagtcatattggcaatcaccacacccttcagggaattagtttcatctgtaaaatgcagcggttagtactatwaaatcatacmaatttctttgtgctttgagaatctwtaarggaatgtctgttgatattctgagtcgattttcatttgcttttgttccagaacggttaaaataaagcatattatttcattta

SEQ ID NO: 8 - DNA, 301 bp, Homo sapiens
  misc_feature (289): n equals a,t,g, or c
aattcggcacgagcggcgacggcggcggctccaagatggcgcaggcgatctttgaggccctggagggaatggacaatcagaccgttctggctgtccagtcattattggatggccaaggagcagtccctgatccgacaggccagagtgtcaatgcgccccctgctatccagccattggatgacgaggatgtatttctctgcgggaagtgtaagaagcaattcaactcgctgccagcgtttatgacccacaagcgggaacagtgccaggggaatgcccccgccctggccanagtctcactggc

SEQ ID NO: 9 - DNA, 686 bp, Homo sapiens
acccacgcgtccgcccaactcctctttcgtctttctttaacacacactaggctctttgtgtattatgattcagtgctatttgtaactgtgtcccagtgaccaaattgcactcgactcgatcagctgttcatccatttcgtgttttttcctgtcaaacattaatccagcaaatatatgaggtatttaccaatttattttcttagtattacaaaataattcattagcataaagtacaatagtgaaatatttgagttgttcggaacctcaattaatcctgttttacatttcagacctaaagctggcaatcaggagaagaagcactttgttttaaatgtggagaagataacaccttgattccatttcattgtcattagtgtattaaccagcaggagaggtgatgagccatttttcaaatgaaataccttttatttccatataatttttttattttagagttcaatagctgtttctatgattatcctcaatttccatatgttactgaatctgaaaaacatctttaaaattcaaacagttccattttctctcttgtaagtgttaaatgtgataaaagtacatattttaaattgttttcagctcttggatatagcagcaataaaaacactaatttgtgggtatttaagaaaacctggagaataaactcatactttaaaagatcaaaaaaaaaa

SEQ ID NO: 10 - DNA, 397 bp, Homo sapiens
  misc_feature (379): n equals a,t,g, or c
  misc_feature (394): n equals a,t,g, or c
cacacgcttagcaacctggagtttgcccagaaagtggagccctgcaacgaccacgtgagagccaagctgtcctgggctaagaagagggatgaggatgacgtgcccactgtgccgtcgactcygggcgaggagcgcctctacaaccccttcctgcgggtggcgtgagtatggctgttgtcccggggcctccaccgttacgtggacccttaggaaggcatctggggactgcgtgttgggctgagtgagcatctctggcttgggggaggctgctcattaagtgcctgcctgcccgsccamccctcggcgccatgctcccgcgtgggcagcgggccctgcgcctcactgcacccctccctgcagagaggagccggtgcgcaantttcacgggcaaggnggt

SEQ ID NO: 11 - DNA, 563 bp, Homo sapiens
  misc_feature (10): n equals a,t,g, or c
  misc_feature (13): n equals a,t,g, or c
  misc_feature (37): n equals a,t,g, or c
  misc_feature (510): n equals a,t,g, or c
  misc_feature (562): n equals a,t,g, or c
aggcaaaacngtnagaccgacagtaaccggatccggnaattcccgggtacgacccacgcgtccggatatatcagagtaactggagtagctgggatttactagtagtgtaaataaaattcactcttcaatacatgaatggaaacttaaattttttttttatgtgtccttgcttatagtttagctgtaataatttaaccttgtattcttgtgccatattctgtctttttattacttataaagacaaaccaaagtaaatctgaaggagacyagaagctttgaaattattgtttgggggttttataaaagcaactactgtcacctccatccagattcttttaaattattgatccatccatagtatatattgctactcattcaagaatcctcaataagtattgagtatttaccatatgttgggatactgtgggctctggagagaggagggggcaatagagctaggrattaaggaatcagttgwgtaaaatgkgtaatatttattcccccattaantaactggactagggaagggactaaaaggccagaaagggggatgaaaaaaaant

SEQ ID NO: 12 - DNA, 443 bp, Homo sapiens
gagacctcggctccggaatcactgcagcccccctcgccctgagccagagcaccccgggtcccgccagcccctcacactcccagcaaaatgggcaaggagaagacccacatcaacatcgtggtcatcggccacgtggactccggaaagtccaccaccacgggccacctcatctacaaatgcggaggtattgacaaaaggaccattgagaagttcgagaaggaggcggctgagatggggaagggatccttcaagtatgcctgggtgctggacaagctgaaggcggasgtgagcgcgrrcatcaccatcgacatctccctctggaagttcgagaccaccaagtactacatcaccatcatcgatgcccccggccaccgcgacttcatcaagaacatgatcacgggtacatcccaggcggactgcgcagtgctgatcgtggcggcggg

SEQ ID NO: 13 - DNA, 2438 bp, Homo sapiens
  misc_feature (117): n equals a,t,g, or c
  misc_feature (681): n equals a,t,g, or c
  misc_feature (713): n equals a,t,g, or c
  misc_feature (2413): n equals a,t,g, or c
cactgggagggggtgggggatctgggcaaggtgggtgattcctcccaggaggtgcttgaggccccgatggactcctgaccataatcctagccccgagacaccatcctgagccagggnaacagccccagggttggggggtgccggcatctcccctagctcaccaggcctggcctctgggcagtgtggcctcttggctatttctgtgtccagttttggaggctgagttctggttcatgcagacaaagccctgtccttcagtcttctagaaacagagacaagaaaggcagacacaccgcggccaggcacccatgtgggcgcccaccctgggctccacacagcagtgtcccctgccccaraggtcgcagctaccctcagcctccaatgcattggcctctgtaccgcccggcagccccttctggccggtgctgggttcccactcccggcctaggcacctccccgctctccctgtcacgstcatgtcctgtcctggtcctgatgcccgttgtctaggagacagagccaagcactgctcacgtctctgccgcctgcgtttggaggcccctgggctctcacccagtccccacccgcctgcagagagggaactagggcaccccttgtttctgttgttcccgtgaatttttttcgctatgggaggcagccgaggcctggccaatgcggccnactttcctgagctgtcgctgcctccatggcanagccarggacccccagaacaagaagacccccccgcagatccctcctgagctcggggggctctgccttctcaggccccgggcttcccttctccccagccagaggtggagccaagtggtccagcgtcactccagtgctcagctgtggctggaggagctggcctgtggcacagccctgagtgtcccaagccgggagccaacgaagccggacacggcttcactgaccagcggctgctcaagccgcaagctctcagcaagtgcccagtggagcctgccgcccccrcctgggcaccgggaccccctcaccatccagtgggcccggagaaacctgatgaacagtttggggactcaggaccagatgtccgtctctcttgcttgaggaatgaagacctttattcacccctgccccgttgcttcccgctgcacatggacagacttcacagcgtctgctcataggacctgcatccttcctggggacgaattccactcgtccaagggacagcccacggtctggaggccgaggaccaccagcaggcaggtggactgactgtgttgggcaagacctcttccctctgggcctgttctcttggctgcaaataaggacagcagctggtgccccacctgcctggtgcattgctgtgtgaatccaggaggcagtggacatcgtaggcagccacggccccgggtccaggagaagtgctccctggaggcacgcaccactgcttcccactggggccggcggggcccacgcacgacgtcagcctcttaccttcccgcctcggctaggggtcctcgggatgccgttctgttccaacctcctgctctgggacgtggacatgcctcaaggatacagggagccggcggcctctcgacggcacgcacttgcctgttggctgctgcggctgtgggcgagcatgggggctgccagcgtctgttgtggaaagtagctgctagtgaaatggctggggccgctggggtccgtcttcacactgcgcaggtctcttctgggcgtctgagctggggtgggagctcctccgcagaaggttggtggggggtccagtctgtgatccttggtgctgtgtgccccactccagcctggggaccccacttcagaaggtaggggccgtgtcccgcggtgctgactgaggcctgcttccccctccccctcctgctgtgctggaattccacagggaccagggccaccgcagggactgtctcagaagacttgatttttccgtccctttttctccacactccactgacaaacgtccccagcggtttccacttgtgggcttcaggtgttttcaagcacaacccaccacaacaagcaagtgcattttcagtcgttgtgcttttttgttttgtgctaacgtcttactaatttaaagatgctgtcggcaccatgtttatttatttccagtggtcatgctcagccttgctgctctgcgtggcgcaggtgccatgcctgctccctgtctgtgtcccagccacgcagggccatccactgtgacgtcggccgaccaggctggacaccctctgccgagtaatgacgtgtgtggctgggaccttctttattctgtgttaatggctaacctgttacactgggctgggttgggtagggtgttctggcttttttgtggggtttttatttttaaagaaacactcaatcatcctaaaaaaaaaaaaaaaaaaaaaaaaaattnctcggtccgcaagggaattcagtgg

SEQ ID NO: 14 - DNA, 2347 bp, Homo sapiens
aattcggcacgmgctgaggaccgcacggaaacggggaagtcaggtggccgctgccgccgccgccgccgcggtttgtcgccagaaggaagatggcggatctggaggagcagttgtctgatgaagagaaggtgcgtatagcagcaaaattcatcattcatgcccctcctggagaatttaatgaggttttcaatgatgttcggttactgcttaataatgacaatcttctcagggaaggagcagcccatgcatttgcacagtataacttggaccagtttactccagtaaaaattgaaggttatgaagatcaggtattgataacagaacatggcgacttgggaaatggaaagtttttggatccaaagaacagaatctgttttaaatttgatcacttaaggaaggaggcaactgatccaagaccctgtgaagtagaaaatgcagttgaatcatggagaacttcagtagaaactgctctgagagcttacgtaaaagaacattacccgaatggagtctgcactgtgtatggcaaaaaaatagatggacagcaaaccattattgcatgcatagaaagccatcagttccaagcaaaaaatttttggaatggtcgttggaggtcagaatggaagtttacaatcactccttcaaccactcaagtggttggcatcttgaaaattcaggttcattattatgaagatggtaatgttcagctagtgagtcataaagatatacaagattccctaacagtgtctaatgaagtgcaaacagcaaaagaatttataaagattgtagaagctgcagaaaatgaataccagactgccatcagtgagaattatcagacaatgtcggacactactttcaaagccttacgtcgacagttgccagttacacgcactaagattgattggaacaagatccttagctacaagattggcaaagagatgcagaatgcataagatgaacattgcatgaccggatcattttagtgtctttgcgttaaaaaatcattgcaaaagtattctgaactgtcaagctgcccagtcagatgggctgttgccatttaaaatcactgtaattaattagtttgattagagcacaaagcttagctaatcaaccattatttttcattttgtttgttctaagaggattgaaaatcagtttagtttaaatgtctttctgttaggcctttctttcttacaatgaagagatgattcttctagtttatggttaaaagtttttgaagtgtctcaaaaatattttactaactgtaaccctaaaattgatgtcttttggtttatgaaatcagtaatttttgatatttccccagttctttttaatggggtcaataatggacattctagtttaaggtggttgatggatttagccatatatgctgctaaagaaattgtctaccttttcttcctcacctgttccatttatgtaaagttgagattagagggaaagcattttctatatcaattgtgtttaaacctttcaagaaggttatttagctagcttagtgttgaactaaattttttttaaacaaggcaaggtctaatgctgttttgagattctgaaattaatgaaaatacttatttcagaaatgcatttaatgctttttttcttgtgacagttacgcaaatcagcttgaattccatatgtccctgagttatttttatcataaagccacaaatgtattataacaaggcaaattgtaatatatataatcctgaactcatgaccatgtctcggtttattttttttttcttggattgaaaagtactgaaattcaatgtgacattaaaatgcaaattttcctatttatttgagtagaaaatcacttaccagtgagcatatatattttaaaatactttctttggatattgtaattcttaactggttgtaaattagaaaagctgggattacatatggtgtgcggttacagtctaaattttttcatcctcctatgcatcataagcatgtttgtaatattttcaaaaatagttctactgatgctacaggaatttcaagcctgtggtgaatgttagtatttaccatagggagtgaagtggagttatggtttcattcaatagagtattgcygattatacttgagtggaatcctttcctcacgtactcccacagacgtctgggcctggaaattttttttttattttattttattgtttttttttttagaaaaacaccacttttattatgtacaataaaatatttcattagcttgaattgtatagatttttaaaaattcaatgaaagcatgttgtttaatttctttttaaaatcactgttgggctttgaaagcattgagaatataatatgaaattatgaaaaaa

SEQ ID NO: 15 - DNA, 2006 bp, Homo sapiens
  misc_feature (862): n equals a,t,g, or c
  misc_feature (1006): n equals a,t,g, or c
ggcagagctgtaccagtggcagcagcaagccgaatagccccagcatttccccttcaatacttagtaacacggagcacaagaggggacctgaggtcacttcccaaggggttcagacttccagcccagcatgtaaacaagagaaagacgataaggaagagaagaaagacgcagctgagcaagttaggaaatcaacattgaatcccaatgcaaaggagttcaacccacgttccttctctcagccaaagccttctactaccccaacttcacctcggcctcaagcacaacctagcccatctatggtgggtcatcaacagccaactccagtttatactcagcctgtttgttttgcaccaaatatgatgtatccagtcccagtgagcccaggcgtgcaacctttatacccaatacctatgacgcccatgccagtgaatcaagccaagacatatagagcaggtaaagtaccaaatatgccccaacagcggcaagaccagcatcatcagagtgccatgatgcacccagcgtcagcagcgggcccaccgattgcagcmaccccaccagcttactccacgcaatatgttgcctacagtcctcagcagttcccaaatcagccccttgttcagcatgtgccacattatcagtctcagcatcctcatgtctatagtcctgtaatacagggtaatgctagaatgatggcaccaccaacacacgcccagcctggtttagtatcttcttcagcaactcagtacggggctcatgagcagacgcatgcgatgtatgcatgtcccaaattaccatacaacaaggagacaagcccttctttctactttgccatttccacgggctcccttgctcagcagtatgngcraccctaacgctaccctgcacccacatactccacaccctcagccttcagctacccccactggacagcagcaaagccaacatggtggaagtcatcctgcacccagtcctgttcagcaccatcagcaccaggccgcccaggctnctccatctggccagtccacagcagcagtcagccatttaccacgcggggcttgcgccaactccaccctccatgacacctgcctccaacacgcagtcgccacagaatagtttcccagcagcacaacagactgtytttacgatccatccttctcacgttcagccggcgtataccaacccaccccacatggcccacgtacctcaggctcatgtacagtcaggaatggttccttctcatccaactgcccatgcgccaatgatgctaatgacgacacagccacccggcggtccccaggccgccctcgctcaaagtgcactacagcccattccagtctcgacaacagcgcatttcccctatatgacgcacccttcagtacaagcccaccaccaacagcagttgtaaggctgccctggaggaaccgaaaggccaaattccctcctcccttctactgcttctaccaactggaagcacagaaaactagaatttcatttattttgtttttaaaatatatatgttgatttcttgtaacatccaataggaatgctaacagttcacttgcagtggaagatacttggaccgagtagaggcatttaggaacttgggggctattccataattccatatgctgtttcagagtcccgcaggtaccccagctctgcttgccgaaactggaagttatttattttttaataacccttgaaagtcatgaacacatcagctagcaaaagaagtaacaagagtgattcttgctgctattactgctaaaaaaaaaaaaaaaaaaaaatcaagacttggaacgcccttttactaaacttgacaaagtttcagtaaattcttaccgtcaaactgacggattattatttataaatcaagtttgatgaggtgatcactgtctacagtggttcaacttttaagttaagggaaaaacttttactttgtagataatataaaataaaaacttaaaaaaaatttaaaaaataaaaaaagttttaaaaactgaaaa

SEQ ID NO: 16 - DNA, 986 bp, Homo sapiens
  misc_feature (613): n equals a,t,g, or c
  misc_feature (932): n equals a,t,g, or c
  misc_feature (933): n equals a,t,g, or c
  misc_feature (985): n equals a,t,g, or c
tcaaagtaactcctgacctcaagccaacagaagcctcaagttcggcttttcgcttgatgccagctcttggcgtgagtgtggctgaccagaagggaaaaagcacagtggcctcttcagaagcaaaaccagctgccacgatccgcatcgtgcagggactgggagtgatgcctcccaaagcaggccagaccatcaccgttgcaacccacgccaagcaaggggcctcggtggccagtgggtctggaactgtccatacttcagcggtgtccttacccagtatgaatgctgctgtgtccaagactgtagctgtggcttctggggctgcaagacccccatcagcatcagcacaggagcccccaccgtgcggcaggtccctgtcagcaccacggttgtgtccacgtcccaggctgggaagttgcctacacggatcacagttcccctctctgtgatcagccagccaatgaagggcaagagcgtggtcacagcccccatcatcaaaggcaaccttggagccaacctcagtgggttgggccgcaacatcatcctcacaactatgccagcaggcactaagctcattgctggcaataagcctgttagtttcctcactgctcagcanttgcagcagcttcagcagcaaggtcaggccacacaggtgcgcatccagactgtccctgcatcccatctccaacagggaacagcttctggctcctccaaagcagtctccactgttgttgtgactacagctccgtctcctaaacaggcacctgagcaacaatgattatgagagaggatggcttccgtgaaagaccatgcctggtctgtcctggctgagaagggaccagggagttgcatcattgttttaagctgcctgttcaaggcagccaggcgagggtgatggcaacggtggcctggttygtgggcctggattctgcgcnngggccatagtgggagcaccctgagaaaggtcactcccgggttccaaaggctng

SEQ ID NO: 17 - DNA, 1589 bp, Homo sapiens
  misc_feature (25): n equals a,t,g, or c
  misc_feature (555): n equals a,t,g, or c
  misc_feature (809): n equals a,t,g, or c
  misc_feature (1033): n equals a,t,g, or c
tttgaacttggggaaacaaggttgncatcccagtggcctcaaccctccctcagcccctcttgccccccaccccagcctaagatgaagaggatcggaggcttgtcagagctgggaggggttttcgaagctcagcccacccccctcattttggatataggtcagtgaaggcccagggagaggccatgattcgcccaaagccagacagcaacggggaggccragtgcaggctggcaccgccttctctaaatgaggggcctcaggtttgcctgagggcgaggggagggtggcaggtgaccttctgggaaatggcttgaagccaagtcagctttgccttccacgctgtctccagacccccaccccttccccactgcctgcccacccgtggagatgggatgcttgcctagggcctggtccatgatggagtcaggtttggggttcgtggaaagggtgctgcttccctctgcctgtcmctctcaggcatgcctgtktgacatcagtggcatggctccagtctgctgccctccatcccgacatggacccggagctaacamtggncccctagaatcagcctaggggtcagggaccaaggacccctcamcttgcaacacacagacacamgcacacacacacacaggaggagaaatctcacttttctccatgagttttttctcttgggctgagactggatactgcccggggcagctgccagagaagcatcggagggaattgaggtctgctcggccgtcttcactcgcccccgggtttggcgggccaaggactgccgaccgaggctggagctggcgtctgtnttcaagggcttacacgtggaggaatgctcccccatcctccccttccctgcaaacatggggttggctgggcccagaaggttgtgatgaagaaaagcgggccagtgtgggaatgcggcaagaaggaattgacttcgactgtgacctgtggggatttctcccagctctagacaaccctgcaaaggactgttttttcctgagcttggccagaagggggccatgaggcntcagtggactttccaccccctccctggcctgttctgttttgcctgaagttggaatgagtgtggctcccctctatttagcatgacaagccccaggcaggctgtgcgctgacaaccaccgctccccagcccagggttcccccagccctgtggaagggactaggagcactgtagtaaatggcaattctttgacctcaacctgtgatgaggggaggaaactcacctgctggcccctcacctgggcacctggggagtgggacagagtctgggtgtatttattttcctccccagcaggtggggagggggtttgggggcttgcaagtatgttttagcatgtgtttggttctggggcccctttttactccccttgagctgagatggaaccctttttgtgcccgagctgggggccatgagctccagacccccagcaaccctcctatcacctcccctccttgcctcctgtgtaatcatttcttgggccctcctgaaacttacacacaaaacgttaagtgatgaacattaaatagcaaagaaagaaaaataaaaaaaaaaaaaaaaa

SEQ ID NO: 18 - DNA, 846 bp, Homo sapiens
  misc_feature (746): n equals a,t,g, or c
gcacccgcctcgcccgtgatgccaccgcagacccagtcccccgggcagccggcccagcccgcgcccatggtgccactgcaccagaagcagagccgcatcacccccatccagaagccgcggggcstcgaccctgtggagatcctgcaggagcgcgagtacaggctgcaggctcgcatcgcacaccgaattcaggaacttgaaaaccttcccgggtccctggccggggatttgcgaaccaaagcgaccattgagctcaaggccctcaggctgctgaacttccagaggcagctgcgccaggaggtggtggtgtgcatgcggagggacacagcgctggagacagccctcaatgctaaggcctacaagcgcasaagcgccagtccctgcgcgaggcccgcatcactgagaagctggagaagcagcagaagatcgagcaggagcgcaagcgccggcagaagcaccaggaatacctcaatagcattctccagcatgccaaggatttcaaggaatatcacagatccgtcacaggcaaaatccagaagctgaccaaggcagtggccacgtaccatgccaacacggagcgggagcagaagaaagagaacgagcggatcgagaaggagcgcatgcggaggctcatggctgaagatgaggaggggtaccgcaagctcatcgaccagaagaaggacaagcgcctggcctacctcttgcagcagacagacgagtacgtggctaactcacggagctggtgncggcacaaggctgcccaggtcgccaaggagaaaaagaagaaaaagaaaaagaagaaggcagaaaatgcagaaggacagacgcctgccattgggccggatg

SEQ ID NO: 19 - DNA, 2192 bp, Homo sapiens
  misc_feature (115): n equals a,t,g, or c
  misc_feature (2106): n equals a,t,g, or c
  misc_feature (2118): n equals a,t,g, or c
  misc_feature (2143): n equals a,t,g, or c
aaacaaaaggcgatattctgcctgggcaaatctgtgactaatcttcctcaagtcataaaacaaaagctgacacctttatatgagctggtaaaggaagtaccttgtgcctctgtgnaaaaaactatacctgaaatgggctcttgaagagtatctggatgaatttgacccctgtcattgccggccttgtcaaaatggtggtttggctactgttgaggggacccattgtctgtgccattgcaaaccgtacacatttggtgcggcgtgtgagcaaggagtcctcgtagggaatcaagcaggaggggttgatggaggttggagttgctggtcctcttggagcccctgtgtccaagggaagaaaacaagaagccgtgratgcaakaacccacctcccagtgggggtgggagatcctgcgttggagaaacgacagaaagcacacaatgcgaagatgaggagctggagcacttgaggttgcttgaaccacattgctttcctttgtctttggttccaacagaattctgtccatcacctcctgccttgaaagatggatttgttcaagatgaaggtacaatgtttcctgtggggaaaaatgtagtgtacwcttgcaatgaaggatactctcttattggaaacccagtggccagatgtggagaagatttacggtggcttgttggggaaatgcattgtcagaaaattgcctgtgttctacctgtactgatggatggcatacagagtcacccccaaaaacctttctacacagttggtgagaaggtgactgtttcctgttcaggtggcatgtccttagaaggtccttcagcatttctctgtggctccagccttaagtggagtcctgagatgaagaatgcccgctgtgtacaaaaagaaaatccgttaacacaggcagtgcctaaatgtcagcgctgggagaaactgcagaattcaagatgtgtttgtaaaatgccctacgaatgtggaccttccttggatgtatgtgctcaagatgagagaagcaaaaggatactgcctctgacagtttgcaagatgcatgttctccactgtcagggtagaaattacacccttactggtagggacagctgtactctgcctgcctcagctgagaaagcttgtggtgcctgcccactgtggggaaaatgtgatgctgagagcagcaaatgtgtctgccgagaagcatcggagtgcgaggaagaagggtttagcatttgtgtggaagtgaacggcaaggagcagacgatgtctgagtgtgaggcgggcgctctgagatgcagagggcagagcatctctgtcaccagcataaggccttgtgctgcggaaacccagtaggctcctggaggccmtggtcagcttgcttggaatccagcaggcagctggggctgagtgaaaacatctgcacaactgggcactggacagcttttccttctccagtgtctaccttcctcctcaactcccagccatctgtataaacacaatcctttgttctcccaaatctgaatcgaattactcttttgcctcctttttaatgtcagtaaggatatgagcctttgcacaggctggctgcgtgttcttgaaataggtgttaccttctctgggccttggttttttaaaatctgtaaaattagaggattgcactagagaaacttgaatgctccattcaggcctatcattttattaagtatgattgacacagcccatgggccagaacacactctacaaaatgactaggataacagaaagaacgtgatctcctgattagagagggtggttttcctcaatggaaccaaatataaagaggacttgaacaaaaatgacagatacaaactatttctatcctgagtagtaatctcacacttcatcctatagagtcaaccaccacagataggrattccttattctttttttaatttttttaagacagagtctcactttgttgcccaggytggagcgcagtggggtgatctcatctccctgcaacctccgcctcctgggttcaagcgattcttgtgcctcagcttcccaagcagctggggattacaggtgcccgccaccacgcccagctaatttttgcatttttagtagagatggggtttcancatgttggccangctcgtctccaactcctgacctcangtaatccgcctgccttggcctcccaaagtgctgggatacagacatgaac

SEQ ID NO: 20 - DNA, 1011 bp, Homo sapiens
  misc_feature (54): n equals a,t,g, or c
ctctaatacgactcactataggcaaagctggtagcctgcagtaccggatscrgnaattcccggggatggaagcgtttttggggtcgcggtccggactttgggcggggggtccggccccaggacagttttaccgcattccrtccactcccgattccttcatggatccggcgtctgcactttacagaggtccaatcacgcggacccagaaccccatggtgaccgggacctcagtcctcggcgttaagttcgagggcggagtggtgattgccgcagacatgctgggatcctacggctccttggctcgtttccgcaacatctctcgcattatgcgagtcaacaacagtaccatgctgggtgcctctggcgactacgctgatttccagtatttgaagcaagttctcggccagatggtgattgatgaggagcttctgggagatggacacagctatagtcctagagctattcattcatggctgaccagggccatgtacagccggcgctcgaagatgaaccctttgtggaacaccatggtcatcggaggctatgctgatggagagagcttcctcggttatgtggacatgcttggtgtagcctatgaagccccttcgctggccactggttatggtgcatacttggctcagcctctgctgcgagaagttctggagaagcagccagtgctaagccagaccgaggcccgcgacttagtagaacgctgcatgcgagtgctgtactaccgagatgcccgttcttacaaccggtttcaaatcgccactgtcaccgaaaaaggtgttgaaatagagggaccattgtctacagagaccaactgggatattgcccacatgatcagtggctttgaatgaaatacagatgcattatccagaactgaagttgccctacttttaactttgaacttggctagttcaaagatagactcttcttttgtaaagtaaataaattcttcaaaatgcaaaaaaaaaaaaaaaaaaaaaacttcragactagttctctctc

SEQ ID NO: 21 - DNA, 2019 bp, Homo sapiens
  misc_feature (2003): n equals a,t,g, or c
  misc_feature (2007): n equals a,t,g, or c
ggcagagcccaattcactcccttccctcgcagtgactttctcattctccctgggtacatcgacttcactgcagaccaggtggacctgacttctgctctgaccaagaaaatcactcttaagaccccactggtttcctctcccatggacacagtcacagaggctgggatggccatagcaatggcggtgagccccatggggtgtgggggaaggagcaaggactccatcgcctttccccaaaggcattcagtcctgcttctkgtcacttagtagtagtctctttttaatcctgtagcttacaggcggtattggsttcatccaccacaactgtacamctgaattccaggccaatgaagttyggaaagtgaaggtywgaagggcaacgatcattagcaagcgctcctgggaattgcactgaggtggggtggggtgggagtaggggtttattctaatttagtattctttcttcccaccatggggttcagttactgagaagaccctgagattctgtttcttaaagcagcagcaatagaccaggtgtacagtgcctccagcctacccatgtctctaagatgtgttggtgtgatttggtcttgtggcactgccaaagggatcgataagcagagaccccatgcttcagatcaagagcctgatgaaagtagttcaaagatgcgatgccctttctcaccatccctttccagaaatatgaacagggattcatcacagaccctgtggtcctcagccccaaggatcgcgtgcgggatgtttttraggccaaggcccggcatggtttctgcggtatcccaatcacagacacaggccggatggggagccgcttggtgggcatcatctcctccagggacattgattttytcaaagaggaggaacatgactgtttcttggaagagataatgacaaagagggaagacttggtggtagcccctgcaggcatcacactgaaggaggcaaatgaaattctgcagcgcacaagaagggaaagttgcccattgtaaatgaagatgatgagcttgtggccatcattgcccggacagacctgaagaagaatcgggactacccactagcctccaaagatgccaagaaacagctgctgtgtggggcagccattggcactcatgaggatgacaagtataggctggacttgctcgcccaggctggtgtggatgtagtggttttggactcttcccagggaaattccatcttccagatcaatatgatcaagtacatcaaagacaaataccctaatctccaagtcattggaggcaatgtggtcactgctgcccaggccaagaacctcattgatgcaggtgtggatgccctgcgggtgggcatgggaagtggctccatctgcattacgcaggaagtgctggcctgtgggcggccccaagcaacagcagtgtacaaggtgtcagagtatgcacggcgctttggtgttccggtcattgctgatggaggaatccaaaatgtgggtcatattgcgaaagccttggcccttggggctccacagtcatgatgggctctctcctggctgccaccactgaggcccctggtgaatacttcttttccgatgggatccggctaaagaaatatcgcggtatgggttctctcgatgccatggacaagcacctcagcagccagaacagatatttcagtgaagctgacaaaatcaaagtggcccagggagtgtctggtgctgtgcaggacaaagggtcaatccacaaatttgtcccttacctgattgctggcatccaacactcatgccaggacattggtgccaagagcttgacccaagtccgagccatgatgtactctggggagcttaagtttgagaagagaacgtcctcagcccaggtggaaggtggcgtccatagcctccattcgtatgagaagcggcttttctgaaaagggatccagcacacctcctcggtttttttttcaataaaagtttagaaagaaaaaaaaaaaaaaaaaaaattctcggggggggncccngtacccaattgg

SEQ ID NO: 22 - DNA, 2022 bp, Homo sapiens
  misc_feature (1588): n equals a,t,g, or c
  misc_feature (1615): n equals a,t,g, or c
gctttctggcgggcgctgggagaagacggacctcacctacaggatccttcggttcccatggcagttggtgcaggagcaggtgcggcagacgatggcagaggccctaaaggtatggagcgatgtgacgccactcacctttactgaggtgcacgagggccgtgctgacatcatgatcgacttcgccaggtactgcatgggggacgacctgccgtttgatgggcctggggcatcctggcccatgccttcttccccaagactcaccgagaaggggatgtccacttcgactatgatgagacctggactatcggggatgaccagggcacagacctgctgcaggtggcasccatgaatttggccacgtgctggggctgcagcacacaacagcagccaaggccctgatgtccgccttctacacctttcgctacccactgagtctcagcccagatgactgcaggggcgttcaacacctatatggccagccctggccactgtcacctccaggaccccagccctgggcccccaggctgggatagacaccaatgagattgcaccgctggagccagacgccccgccagatgcctgtgaggcctcctttgacgcggtctccaccatccgaggcgagctctttttcttcaaagcgggctttgtgtggcgcctccgtgggggccagctgcagcccggctacccagcattggcctctcgccactggcagggactgcccagccctgtggacgctgccttcgaggatgcccagggccacatttggttcttccaaggtgctcagtactgggtgtacgacggtgaaaagccagtcctgggccccgcacccctcaccgagctgggcctggtgaggttcccggtccatgctgccttggtctggggtcccgagaagaacaagatctacttcttccgaggcagggactactggcgtttccaccccagcacccggcgtgtagacagtcccgtgccccgcaggccactgactggagaggggtgccctctgagatcgacgctgccttccaggatgctgatggctatgcctacttcctgcgcggccgcctctactggaagtttgaccctgtgaaggtgaaggctctggaaggcttcccccgtctcgtgggtcctgacttctttggctgtgcgagcctgccaacactttcctctgaccatggcttggatgccctcaggggtgctgacccctgccaggccacgaatatcaggctagagacccatggccatctttgtggctgtgggcaccaggcatgggactgagcccatgtctcctcagggggatggggtggggtacaaccaccatgacaactgccgggagggccacgcaggtcgtggtcacctgccagcgactgtctcagactgggcagggaggctttggcatgacttaagaggaagggcagtcttgggcccgctatgcaggtcctgggcaaacctggctgccctgtctccatccctgtccctcagggtagcaccatggcaggactgggggaactggagtgtccttgctgtatccctgttgtgaggttccttccaggggctggcactgaagcaagggtgctggggccccatggccttncagccctggctgagcaactgggctgtnagggcagggccacttcctgaggtcaggtcttggtaggtgcctgcatctgtctgccttctggctgacaatcctggaaatctgttctccagaatccaggccaaaaagttcacagtcaaatggggaggggtattcttcatgcaggagaccccaggccctggaggctgcaacatacctcaatcctgtcccaggccggatcctcctgaagcccttttcgcagcactgctatcctccaaagccattgtaaatgtgtgtacagtgtgtataaaccttcttcttcttttttttttttaaactgaggattgtcattaaacacagttgttttctaaaaaaaaaaaaaaaaaaaaaaaaaaaaaaaaaaaaaaaaaaaaaaaaaaaaaaaagggcggccgctcgcgatctagaactag

SEQ ID NO: 23 - DNA, 1126 bp, Homo sapiens
  misc_feature (1126): n equals a,t,g, or c
cccttccccactgcacacacctcagaggctgttcttggggccctacaccttgaggaggggcaggtaaactcctgtcctttacacattcggctccctggagcagactctggtcttctttgggtaaacgtgtgacgggggaaagccaaggtctggagaagctcccaggaacaayygatggccttgcagcactcacacaggacccccttcccctaccccctcctctctgccgcaatacaggaacccccaggggaaagatgagcttttctaggctacaattttctcccaggaagctttgatttttaccgtttcttccctgtattttctttctctactttgaggaaaccaaagtaaccttttgcacctgctctcttgtaatgatatagccagaaaaacgtgttgccttgaaccacttccctcatctctcctccaagacactgtggacttggtcaccagctcctcccttgttctctaagttccactgagctccatgtgccccctctaccatttgcagagtcctgcacagttttctggctggagcctagaacaggcctcccaagttttaggacaaacagctcagttctagtctctctggggccacacagaaactctttttgggctcctttttctccctctggatcaaagtaggcaggaccatgggaccaggtcttggagctgagcctctcacctgtactcttccgaaaaatcctcttcctctgaggctggatcctagccttatcctctgatctccatggcttcctcctccctcctgccgactcctgggttgagctgttgcctcagtcccccaacagatgcttttctgtctctgcctccctcaccctgagccccttccttgctctgcacccccatatggtcatagcccagatcagctcctaacccttatcaccagctgcctcttctgtgggtgacccaggtccttgtttgctgttgatttctttccagaggggttgagcagggatcctggtttcaatgacggttggaaatagaaatttccagagaagagagtattgggtagatattttttctgaatacaaagtgatgtgtttaaatactgcaattaaagtgatactgaaacacaaaaaaaaaaaaaaaaaaaaaaaaaaaaaan

SEQ ID NO: 24 - DNA, 2598 bp, Homo sapiens
  misc_feature (2304): n equals a,t,g, or c
  misc_feature (2500): n equals a,t,g, or c
  misc_feature (2533): n equals a,t,g, or c
  misc_feature (2553): n equals a,t,g, or c
ggcacagcttgtttttccaagcagctgtttggctttccraagcccactttctgtctttaaraggtttaaagaractaccagaccattttccaatgaatgtcttggtaccaccagacccgtagttcctattgattcatcagattttgcattggatattcgcatgcctggggttacacctaaacagtccgatacatacttctgcatgtctatgcgaataccagtggatgaggaagccttcgtgattgacttcaagcctcgagccagcatggatactgtccatcacatgttactttttggatgcaatatgccttcatccactggraattactggttttgtgatgaaggaacctgtacagataaagccaatattctgtatgcctgggcgagaaatgctccccctacccggctccccaaaggtgttggattcagagttggaggagagactggaagtaaatactttgtactacaggtacactatggggatattagtgcttttagagataataacaaggactgttctggtgtgtccttacacctcacacgtctgccacagcctttaattgctggcatgtaccttatgatgtctgttgacactgttatcccagcaggagaaaaagtggtgaattctgacatttcatgccattrtwaaaattatccaatgcatgtctttgcctatagagttcacactcaccatttaggtaaggtagtaagtggatacagagtaagaaatggacagtggacactgattggacggcagagccctcagctgccacaggctttctaccctgtggggcatccagttgatgtaagttttggtgacctactggctgcaagatgtgtattcactggtgaaggaaggacagaagccacacacattggtggcacgtctagtgatgaaatgtgcacttatacattatgtattacatggaagccaagcatgcagtttctttcatgacctgtacccagaatgtagctccagatatgttcagaaccataccaccagaggccaacattccaattcccgtgaagtctgatatggttatgatgcatgaacatcataaagaaacagaatataaagataagattcctttactacagcagccaaaacgagaagaagaagaagtgttagaccagggtgatttctattcactactttccaagctgctaggagaaagggaagatgttgttcatgtgcacaaatataatcctacagaaaaggcagaatcagagtcagacctggtagctgagattgcaaatgtagtccaaaaaaaggatcttggtcgatctgatgccagagagggtgcagaacatgagaggggtaatgctattcttgtcagagacagaattcacaaattccacagactagtatctaccttgaggccaccagagagcagagttttctcattacagcagcccccacctggtgaaggcacctgggaaccagaacacacaggagatttccacatggaagaggcactggattggcctggagtatacttgttaccaggcmaggtttctggggtggctctagamcctaagaataacctggtgattttccacagaggtgaccatgtctgggatggaaactcgtttgacagcaagtttgtttaccagcaaataggactcggaccaattgaagaagacactattcttgtcatagatccaaataatgctgcagtactccagtccagtggaaaaaatctgttttacttgccacatggcttgagtatagataaagatgggaattattgggtcacagacgtggctctccatcaggtgttcaaactggatccaaacaataaagaaggccctgtattaatcctgggaaggagcatgcaaccaggcagtgaccagaatcacttctgtcaacccactgatgtggctgtggatccaggcactggagccatttatgtatcagatggttactgcaacagcaggattgtgcagttttcaccaagtggaaagttcatcacacagtggggagaagagtcttcagggagcagtcctctgccaggccagttcactgttcctcacagcttggctcttgtgcctcttttgggccaattatgtgtggcagaccgggaaaatggtcggatccagtgttttaaaactgacaccaaagaatttgtgagagagattaagcattcatcatttggaagaaatgtatttgcaatttcatatataccaggcttgctctttgcagtgaatgggaagcctcattttggggaccaagaacctgtacaaggatttgtgatgaacttttccaatggggaaattatmgacatcttcaagccagtgcgcaancttttggatatgcctcatgatattgttgcatctgaagatgggactgtgtacattgggagatgctcataccaacaccgtgtgggaagttccaccttggactkgagaaawttgggaacatcggtycagtttaaaaaagggctggscattgaggtccagggaaatccaaagaagcccgagggcatttgttgtttccccnttacaacccttcgggttattccggtggttggtncctggcggggccatggcccnaatttaattccggtgggaaaaaatcccaggggccctttgggaaga

SEQ ID NO: 25 - DNA, 411 bp, Homo sapiens
  misc_feature (358): n equals a,t,g, or c
  misc_feature (368): n equals a,t,g, or c
  misc_feature (381): n equals a,t,g, or c
  misc_feature (387): n equals a,t,g, or c
  misc_feature (392): n equals a,t,g, or c
gcggccgagctgcagcccgggctcagtctccgccgccgccgtgaacatggagcccccggacgcaccggcccaggcgcgcggggccccgcggctgctgttgctcgcagtcctgctggcggcgcacccagatgcccaggcggaggtgcgcttgtctgtacccccgctggtggaggtgatgcgaggaaagtctgtcattctggactgcacccctacgggaacccacgaccattatatgctggaatggttccttaccgaccgctcgggagctcgcccccgcctagcctcggctgagatgcagggctctgagctccaggtcacaatgcacgacacccggggccgcagtcccccataccagctnggactyccanggggcgcctggtngctggnytganggcccarktggcgacgagc

SEQ ID NO: 26 - DNA, 657 bp, Homo sapiens
  misc_feature (634): n equals a,t,g, or c
  misc_feature (652): n equals a,t,g, or c
aactgaagaattttgagtgaattagacctttatttttctatctggttggatggtggctttaggggaagggggaaaggtgtaggctgggggattgaggtggggaatcattttagctggtgtcagcccctcttcccttcctccattgcacatgaacatatgtccatccatatatattcatcagaatgttaatttattttgctccctctgttaggtccattttctaagggtagaagaggcaagtggtagggatgaggtctgataagaacccagggtggagagggagactcctgggcagccgttttcctcatcctttccctctcccagtccatttccaaatgtggcctccatgtgggtgctagggacatgggaaaaaccactgctatgccatttcttctctctgttcccttcctcacccccgacggtgtggctgatgatgtcttctggtgtcatggtgaccaccccctgttccctgttctggtatttcccctgtcagtttcccctctcggccaggttgtgtcccaaaatcccctcagcctcttctctgcacgttgctgaaggtccaggcttgcctcaagttccatgcttgagcaataaagtggaaacaataaaacctgggaaaaaaaaaaaagggggncgttctaaaggatccccnagggg

SEQ ID NO: 27 - DNA, 1903 bp, Homo sapiens
gggcacgggactcgtgccgattcggcagagcacaaagtttgactccagtctggatcgcaaggacaaattctcctttgacctgggaaaaggggaggtcatcaaggcttgggacattgccatagccaccatgaaggtgggggaggtgtgccacatcacctgcaaaccagaatatgcctacggttcagcaggcagtcctccaaagattccccccaatgccacgcttgtatttgaggtggagttgtttgagtttaagggagaagatctgacggaagaggaagatggcggaatcattcgcagaatacagactcgcggtgaaggctatgctaagcccaatgagggtgctatcgtggaggttgcactggaagggtactacaaggacaagctctttgaccagcgggagctccgctttgagattggcgagggggagaacctggatctgccttatggtctggagagggccattcagcgcatggagaaaggagaacattccatcgtgtacctcaagcccagctatgcttttggcagtgttgggaaggaaaagttccaaatcccaccaaatgctgagctgaaatatgaattacacctcaagagttttgaaaaggccaaggagtcttgggagatgaattcagaagagaagctggaacagagcaccatagtgaaagagcggggcactgtgtacttcaaggaaggtaaatacaagcaagctttactacagtataagaagatcgtgtcttggctggaatatgagtctagtttttccaatgaggaagcacagaaagcacaggcccttcgactggcctctcacctcaacctggccatgtgtcatctgaaactacaggccttctctgctgccattgaaagctgtaacaaggccctagaactggacagcaacaacgagaagggcctcttccgccggggagaggcccacctggccgtgaatgactttgaactggcacgggctgatttccagaaggtcctgcagctctaccccaacaacaaagccgccaagacccagctggctgtgtgccagcagcggatccgaaggcagcttgcccgggagaagaagctctatgccaatatgtttgagaggctggctgaggaggagaacaaggccaaggcagaggcttcctcaggagaccatcccactgacacagagatgaaggaggagcagaagagcaacacggcagggagccagtctcaggtggagacagaagcatagcccctctccaccagccctactcctgcggctgcctgccccccagtctccccactccaccctgttagttttgtaaaaactgaagaattttgagtgaattagacctttatttttctatctggttggatggtggctttaggggaagggggaaaggtgtaggctgggggattgaggtggggaatcattttagctggtgtcagcccctcttcccttcctccattgcacatgaacatatgtccatccatatatattcatcagaatgttaatttattttgctccctctgttaggtccattttctaagggtagaagaggcaagtggtagggatgaggtctgataagaacccagggtggagagggagactcctgggcagccgttttcctcatcctttccctctcccagtccatttccaaatgtggcctccatgtgggtgctagggacatgggaaaaaccactgctatgccatttcttctctctgttcccttcctcaccccgacgtgtggccctaaggctgtgccacctccccctgcccagtccctggtctctgtacagtgtctgtccaggacgtctatccatccatccttgacaacctgtccagatgaggccactgttatcccagtctgtgaggggcgatcacagcccaggtgccggccgatgtggagacgctgatggacttcagtgtgcagga

SEQ ID NO: 28 - DNA, 1333 bp, Homo sapiens
  misc_feature (1311): n equals a,t,g, or c
  misc_feature (1313): n equals a,t,g, or c
  misc_feature (1319): n equals a,t,g, or c
ggccgctagtgcccagctcgcagaaggcgctgctgctggagctcaaggggctgcaggaagagccggtcgagggattccgcgtgacactggtggacgagggcgatctatacaactgggaggtggccatcttcgggccccccaacacctactacgagggcggctacttcaaggcgcgcctcaagttccccatcgactacccatactctccaccagcctttcggttcctgaccaagatgtggcaccctaacatctacgagacgggggacgtgtgtatctccatcctccacccgccggtggacgacccccagagcggggagctgccctcagagaggtggaaccccacgcagaacgtcaggaccattctcctgagtgtgatctccctcctgaacgagcccaacaccttctcgcccgcaaacgtggacgcctccgtgatgtacaggaagtggaaagagagcaaggggaaggatcgggagtacacagacatcatccggaagcaggtcctggggacaaggtggacgcgggtgaacggcgtgaaggtgcccaccacgctggccgagtactgcgtgaagaccaaggcgccggcgcccgacgagggttcagacctcttctacgacgactactacgaggacggcgaggtggaggaggaggccgacagctgcttcggggacgatgaggatgactctggcacggaggagtcctgacaccaccagaataaacttgccgagtttacctcactagggccggacccgtggctccttagacgacagactacctcacggaggttttgtgctggtccccgtctcctctggttgtttcgttttggctttttctccctccccatgtctgttctgggttttcacgtgcttcagagaagaggggctgccccaccgccactcacgtcactcggggctcggtggacgggcccagggtgggagckgccggcccacctgtcccctcgggaggggagctgagcccgacttctaccggggtcccccagcttccggactggccgcaccccggaggagccacgggggcgctgctgggaacgtgggcggggggccgtttcctgacactaccagcctgggaggcccaggtgtagcggtccgaggggcccggtcctgcctgtcagctccaggtcctggagccacgtccagcacagagtggacggattcaccgtggccgactcttttccctgctttggtttgtttgaaatctaaataaaactactttatgagaaaaaaaaaaaaaaaaaaaaaaaaaaaaaaaaaaaaaaaaaaaaaaaaaaaaaaaaaaaaaaaaaaaaaaaaaaananaaaaanaaaaaaaaaaattt

SEQ ID NO: 29 - DNA, 1327 bp, Homo sapiens
  misc_feature (573): n equals a,t,g, or c
  misc_feature (1307): n equals a,t,g, or c
  misc_feature (1325): n equals a,t,g, or c
cttgttctccgccgccgccgcccgccgccgccgccrccgccgcygccgctgccatggctcaatacaagggcgccgcgagcgaggccggccgcgccatgcacctgatgaagaagcgggagaagcagcgcgagcagatggagcagatgaagcagcgcatcgsggaggagaacatcatgaaatccaacattgacaagaagttctctgcgcactacgacgcggtggaggcagagctcaagtccagcaccgtgggtctcgtgaccctgaatgacatgaaggccaagcaggaggctctggtgaaggagcgggagaagcagctggccaagaaggagcagtccaaggagctgcagatgaagctggagaagcttcgagagaaggagcgtaagaaggaagccaagcggaagatctccagcctgtccttcaccctggaggaggaagaagagggaggcgaggaggaagaggaggcggccatgtatgaggaggagatggaaagggaagagatcaccacgaagaagagaaaactggggaagaacccagacgttgacacaagcttcttgcctgatcgagaccgtgagnaggaggagaatcggcttcgggaagagctgcggcaggagtgggaagccaagcaggagaagatcaagagtgaggagatcgagatcaccttcagctactgggatggctctgggcaccggcggacagtcaagatgagaaagggcaacaccatgcagcagttcctgcagaaggcgctcgagatccttcggaaagacttcagtgagctgaggtccgcagggktggagcagctcatgtacatcaaggaggacttgatcatccctcaccatcacagcttctacgacttcatcgtcaccaaggcacgggggaagagtggaccactcttcaactttgatgttcatgacgatgtgcggttgctcagtgacgccactgtggagaaggatgagtcccatgcaggcaaggtggtgctgaggagctggtacgagaagaacaagcacatctttcccgccagccgctgggaaccctacgaccctgaaaagaagtgggacaagtacacgatccgctgagcatccaggaggctgcgcggccccggctcctcagctccctcagtgtgccccgtggtgtcaccgggactccaggcacccgctcccctgcgaccatgccaggcacgctgggaggaggacggcagctgctcgtgtcctgcccctgccacatcagtgactgctttattcttttccaataaagaagtgcacgtgtcagagctggagcgcctgcattgtgagaaaaaaaaaaggaggggnaagaaaaaaaaaaagggngg

SEQ ID NO: 30 - DNA, 709 bp, Homo sapiens
  misc_feature (696): n equals a,t,g, or c
  misc_feature (701): n equals a,t,g, or c
aattcccgggttcgacccacgcgtccggaaaactgcagcttccttctcaccttgaagaataatcctagaaaactcacaaaatgtgtgatgcttttgtaggtacctggaaacttgtctccagtgaaaactttgatgattatatgaaagaagtaggagtgggctttgccaccaggaaagtggctggcatggccaaacctaacatgatcatcagtgtgaatggggatgtgatcaccattaaatctgaaagtacctttaaaaatactgagatttccttcatactgggccaggaatttgacgaagcactgcagatgacaggaaagtcaagagcaccataaccttagatgggggtgtcctggtacatgtgcagaaatgggatggaaaatcaaccaccataaagagaaaacgagaggatgataaactggtggtggaatgcgtcatgaaaggcgtcacttccacgagagtttatgagagagcataagccaagggacgttgacctggactgaagttcgcattgaactctacaacattctgtgggatatattgttcaaaaagatattgttgttttccatgatttagcaagcaactaattttctcccaagctgattttattcaatatggttacgttggttaaataaactttttttagatttaaaaaaaaaaaaaaaaaaccycgggggggggcccggtacccaattngcccnttaggggg

SEQ ID NO: 31 - DNA, 1108 bp, Homo sapiens
  misc_feature (389): n equals a,t,g, or c
  misc_feature (397): n equals a,t,g, or c
tgcttatccttgtgctgatgtttgtggtatggatgaaacgccgggataaagaacgccaggccaaacaacttttaattgatccagaagatgatgtaagagataatattttaaaatatgatgaagaaggtggaggagaagaagaccaggactatgacttgagccagctgcagcagcctgacactgtggagcctgatgccatcaagcctgtgggaatcygacgaatggatgaaagacccatccacgccgagccccagtatccggtccgatctgcagccccacaccctggagacattggggacttcattaatgagggccttaaagcggctgacaatgaccccacagctccaccatatgactccctgttagtgtttgactatgaaggcagtggntccactgntgggtccttgagctcccttaattcctcaagtagtggtggtgagcaggactatgattacctgaacgactgggggccacggttcaagaaacttgctgacatgtatggtggaggtgatgactgaacttcagggtgaacttggtttttggacaagtacaaacaatttcaactgatattcccaaaaagcattcagaagctaggctttaactttgtagtctactagcacagtgcttgctggaggctttggcataggctgcaaaccaatttgggctcagagggaatatcagtgatccatactgtttggaaaaacactgagctcagttacacttgaattttacagtacagaagcactgggattttatgtgcctttttgtacctttttcagattggaattagttttctgtttaaggctttaatggtactgatttctgaaacgataagtaaaagacaaaatattttgtggtgggagcagtaagttaaaccatgatatgcttcaacacgcttttgttacattgcatttgcttttattaaaatacaaaattaaacaaamaaaaaaactcatggagcgattttattatcttgggggatgagaccatgagattggaaaatgtacattacttctagttttagactttagtttgtttttttttttttttcactaaaatcttaaaacttactcagctggttgcaaataaagggagttttcatatcacc

SEQ ID NO: 32 - DNA, 526 bp, Homo sapiens
  misc_feature (502): n equals a,t,g, or c
  misc_feature (524): n equals a,t,g, or c
gaatttttcattatgttgcttttgaaatttgatgcattcctcccatttactttattattgtacacatttaacacacagtagcaaattttgaacgatgtgattgatataacctaacaaatctgagccagttattattagagttgcagaatagaaacttgaagtgctaaatggaataatccaaaggaaattttttaaatgcaggttctagctgaaaaattcaactataagaaaattgtatttatataacatttactatttttgaagactagtgagatttctgtaataattttaattctttaaaaagtgaaagcttgttgtaaagatattttctttttgttattagaaggaaatacaaagagaaaaatttctttctttcatggggcatttgataatttcagtctttgacgatttgtaagcctagaatatactaagctgaataacagctctttggcctcagaattttccagtagccagtawttcyggattaactaagttggaaacncytattaggaacctccagtggnga

SEQ ID NO: 33 - DNA, 555 bp, Homo sapiens
  misc_feature (494): n equals a,t,g, or c
  misc_feature (521): n equals a,t,g, or c
ccggaccctgcacccagcgactgggccccgcgcgcgccctccgcgagggtggaggcggcggctgtgtgcgcagggcccggcaccggactgggaccctggcgtccctccaggccttgcctcctgcgggagsacagtttggcttcacttctctgaccccagcctcggccgtaaagtgaaagagaccggaccagcttcagctttcggactctggttcttggatcgtgtcctctccccctcgccgccctcttcccccaatctgagccattkcaggcctctgcctgckgccccctctctcctcgggatcgggtccccagagccaccatctcctgagcctcccaccccgctgcctgggccctgtggttgctgggcctcccacctcaaggaggggaaggttgtacagcccgaacccgtggagcaatgccctgtctggcctccaaaaccaaaataaaactgggtcactttacaaaaaaaaaaaaaaaaaagggcccgggaanaccggaccggtacctgcaggcgtaccngtttccctatagtgagttgtattagcgttgcata

SEQ ID NO: 34 - DNA, 347 bp, Homo sapiens
  misc_feature (288): n equals a,t,g, or c
  misc_feature (328): n equals a,t,g, or c
  misc_feature (335): n equals a,t,g, or c
gggtcgacccacgcgtccggaccgcgcggctagtggtgtgaggatctgagccccgtggtggggggtggaggcggctcctgcratctaaagggacttgagactctcaccggccgcgcgccatgagggccctgtgggtgctgggcctctcctgcrtcctgctgaccttcgggtcggtccgarctgaygatgaagtcgatgtggatggtacagtggaagaggatctgggtaaaagtagagaaggttcaaggacagatgatgaagtagtacagagagaggaagaagctattncagttggatggattaaatgcatcccaaataagagaacttnagagagnaagtccagaaaa

SEQ ID NO: 35 - DNA, 750 bp, Homo sapiens
  misc_feature (701): n equals a,t,g, or c
  misc_feature (731): n equals a,t,g, or c
gggtggcttccttgtggttcctcagtggtgcctgcaacccctggttcacctccttccaggttctggctccttccagccatggctctcagagtccttctgttaacagccttgaccttatgtcatgggttcaacttggacactgaaaacgcaatgaccttccaagagaacgcaaggggcttcgggcagagcgtggtccagcttcagggatccagggtggtggttggagccccccaggagatagtggctgccaaccaaaggggcagcctctaccagtgcgactacagcacaggctcatgcgagcccatccacctgcaggtccccgtggaggccgtgaacatgtccctgggcctgtccctggcagccaccaccagcccccctcagctgctggcctgtggtcccaccgtgcaccagacttgcagtgagaacacgtatgtgaaagggctctgcttcctgtttggatccaacctacggcagcagccccagaagttcccagaggccctccgagggtgtcctcaagargatagtgacattgccttcttgattgatggctctggtagcatcatcccacatgactttcggcggatgaaggartttgtctcaactgtgatggagcaattaaaaaagtccaaaaccttgttctctttgatgcagtactctgaagaattccggattcactttacttcaaagagttccagaacaancctaacccaagatcactggtgaagccaatnacgcagctgcttggggcgg

SEQ ID NO: 36 - DNA, 1291 bp, Homo sapiens
  misc_feature (29): n equals a,t,g, or c
  misc_feature (298): n equals a,t,g, or c
  misc_feature (695): n equals a,t,g, or c
  misc_feature (795): n equals a,t,g, or c
aagaaaaatgtactacgcctgtcctgtangaagctgaagatttttgcaatgcccatgcaggatatcaagatgatcctgaaaatggtgcagctggactctattgaagatttgggaagtgacttgtacctggaagctacccaccttggcgaaattttctccttacctgggccagatgattaatctgcgtagactcctcctctcccacatccatgcatcttcctacatttccccggagaaggaagagcagtatatcgcccagttcacctctcagttcctcagtctgcagtgcctgcagctnctctatgtggactctttatttttccttagaggccgcctggatcagttgctcaggcacgtgatgaaccccttggaaaccctctcaataactaactgccggctttcggaaggggatgtgatgcatctgtcccagagtcccagcgtcagtcagctaagtgtcctgagtctaagtggggtcatgctgaccgatgtaagtcccgagcccctccaagctctgctggagagagcctctgccaccctccaggacctggtctttgatgagtgtgggatcacggatgatcagctccttgccctcctgccttccctgagccactgctcccagcttacaaccttaagcttctacgggaattccatctccatatctgccttgcagagtctcctgcagcacctcatcgggntgagcaatctgacccacgtgctgtatcctgtccccctggagagttatgaggacatccatggtamcctccamctggagaggttgctatctgcatgccaggntcagggagttgctgtgtgarttggggcggcccagcatggttctggcttagtgggcaacccctgtcctcactgtggggacagaaccttctatgacccggagcccatcctgtgcccctgtttcatgcctaatarctgggtgcacatatcaaatgcttcattctgcatacttggacactaaagccaggatgtgcatgcatcttgaagcaacaaagcagccacagtttcagacaaatgttcagtgtgagtgaggaaaacatgttcagtgaggaaaaaacattcagacaaatgttcagtgaggaaaaaaaggggagttggggataggcagatgttgacttgrggagktaatgtgatctttggggagatacatcttatagagttagaaatagaatctgaatttctaaagggagawtctggcttgggaagtacatgtaggagttaatccctgtgtagactgttgtaaagaaactgttgaaaataaagagaagcaatgtgaagc

SEQ ID NO: 37 - DNA, 1535 bp, Homo sapiens
  misc_feature (1413): n equals a,t,g, or c
  misc_feature (1526): n equals a,t,g, or c
ggcacgagggtacgcagagcttcgtcttccagcgcgaagagatagcgcagttggcgcggcagtacgctgggctggaccacgagctggccttctctcgtctgatcgtggagctgcggcggctgcacccaggccacgtgctgcccgacgaggagctgcagtgggtgttcgtgaatgcgggtggctggatgggcgccatgtgccttctgcacgcctcgctgtccgagtatgtgctgctcttcggcaccgccttgggctcccgcggccactcggggcgctactgggctgagatctcggataccatcatctctggcaccttccaccagtggagagagggcaccaccaaaagtgaggtcttctacccaggggagacggtagtacacgggcctggtgaggcaacagctgtggagtgggggccaaacacatggatggtggagtacggccggggcgtcatcccatccaccctggccttcgcgctggccgacactgtcttcagcacccaggacttcctcaccctcttctatactcttcgctcctatgctcggggcctccggcttgagctcaccacctacctctttggccaggacccttgaccagccaggcctgaaggaagacctgcggatggacaggagcgggcaggcccgcacatatccacttgctggagcccatgtttacagacagggacatacaccatgcagatcctgagttcctgctgtatgagcagggatatccatgcttatgtatccaaacacagagacccatgggaacaaatgagacacatatagatactgagacctgtgtgtacagtaggaccatgcactcacacccatctggagagggagcccccggtataccaagggagccagttgtgttcagacacacacatcacagcttgactcactaactgaggcctttccatagctccacagcttcccacctcctccccaccaaaccggggttctagagttaaggatgggggagggtattatactgcctcagtctgactcctcaacccagcagcaatttgaggggatgagggggaagaggagctgccttttggaggcccccttcacctgcagctatgatgcccttccccttctcccctgtcctcaccatatgccttatccccattctactcccctgctatgcaagtgcccctgtggcttgtccccaaccccctcagcaacaaagctcagctggggaacgagagtaatttgaagaatgcttgaagtcagcgtcttccattccagaaagacccccattcttcctttgggggtatgatgtggaagctggtttcagcccaggacccaccactgaggagaggatctagacaggtgggcctaattccaaggggcccttcctggcctggagaaggccttttacacacacacaacacatacacacacacacacacanacacatatcacagttttcacacagcccctgctgcattctctgtccatctgtctgtttctattaataaagatttgttgatctgttccaaaaaaaaaaaaaaaaaaaaaaaaaangggggggct

SEQ ID NO: 38 - DNA, 295 bp, Homo sapiens
ctggtcacactattacatgccatgcaggcacgcgataaaacgctggggctggcaacactgtgcattggcggcggtcagggaattgcgatggtgattgaacggttgaattaatcaataaaaacacccgatagcgaaagttatcgggtgttttcttgaacatcgacggcgaaggtaaccccattaatcaccagtcaaaacttttcaccagcgtcactcgccagcattacgcatcggtacaataaatgtttcctgtttctcattgaccgatccttcatcggtgatcagcgtcattggg

SEQ ID NO: 39 - DNA, 1300 bp, Homo sapiens
  misc_feature (641): n equals a,t,g, or c
  misc_feature (1297): n equals a,t,g, or c
  misc_feature (1298): n equals a,t,g, or c
gcggactggcagggggcagggaagctcaaagatctggggtgctgccaggaaaaagcaaattctggaagttaatggttttgagtgatttttaaatccttgctggcggagaggcccgcctctccccggtatcagcgcttcctcattctttgaatccgcggctccgcggtcttcggcgtcagaccagccggaggaagcctgtttgcaatttaagcgggctgtgaacgcccagggccggcgggggcggggccgaggcgggccattttraataaagaggcgtgccttccaggcaggctctataagtraccgccgcggcgagcgtgcgcgckttgcaggtcactgtagcgggacttcttttggttttctttctctttggggcacctctggactcactccccagcatgaaggcgctgagcccggtgcgcggctgctacgaggcggtgtgctgcctgtcggaacgcagtctggccatcgcccggggccgagggaagggcccggcagctgaggagccgctgagcttgctggacgacatgaaccactgctactcccgcctgcggraactggtacccggagtcccgagaggcactcagcttagccaggtggaaatcctacagcgcgtcatcgactacattctcgacctgcangtagtcctggccgagccagcccctggaccccctgatggcccccaccttcccatccagacagccgagctcgctccggaacttgtcatctccaacgacaaaaggagcttttgccactgactcggccgtgtcctgacacctccagaacgcaggtgctggcgcccgttctgcctgggaccccgggaacctctcctgccggaagccggacggcagggatgggccccaacttcgccctgcccacttgacttcaccaaatcccttcctggagactaaacctggtgctcaggagcgaaggactgtgaacttgtggcctgaagagccagagctagctctggccaccagctgggcgacgtcaccctgctcccaccccacccccaagttctaaggtctyttcagagcgtggaggtgtggaaggagtggctgctctccaaactatgccaaggcggcggcagagctggtcttctggtctccttggagaaaggttctgttgccctgatttatgaactctataatagagtatataggttttgtaccttttttacaggaaggtgactttctgtaacaatgcgatgtatattaaactttttataaaagttaacattttgcataataaacgatttttaaacaaaaaaaaaaaaaaaaaaggggggccgccctanngg

SEQ ID NO: 40 - DNA, 215 bp, Homo sapiens
  misc_feature (210): n equals a,t,g, or c
  misc_feature (213): n equals a,t,g, or c
cagaaacagaagttcacactaacagagtatggttttaattttcctttgaatgaaaaggatagaaagataaaattgtgtattgttaacatgtaaataaaattggagctaatttgaaactagcttctcaataacttcatctttctagagactcattacctgtgggcttgtcmaacctggactatttggccaaatwggttggataaaaaaggnatntt

SEQ ID NO: 41 - DNA, 474 bp, Homo sapiens
  misc_feature (85): n equals a,t,g, or c
  misc_feature (216): n equals a,t,g, or c
  misc_feature (374): n equals a,t,g, or c
  misc_feature (449): n equals a,t,g, or c
tcgacccacgcgtccgggagactacggtaaaggcgcgcgcacgcagccaacatgccggtggcccggagctgggtttgtcgcaagnctacgtgacccctcggaggccctttgagaagtcgcggctcgaccaagagctgaagctgataggcgagtacgggctccggaacaaacgtgaggtgtggagggtcaagttcaccctggccaagatccgcaagnccgcgcgggarctgctgacgctggacgagaaggacccgcggcgcctgtttgagggcaatgccttgcttcggcgactggtgcgcattggagtgctggacgagggcaagatgaagctggattatatcctgggtctgaagatgaggattcttggagagrcntctgcagacccaggtytttcaagctggggttggccaatccatccaccatgccctgtgctgatccgccaggccacncaggtccgaaagcaagtggtgaaca

SEQ ID NO: 42 - DNA, 425 bp, Homo sapiens
  misc_feature (375): n equals a,t,g, or c
  misc_feature (403): n equals a,t,g, or c
  misc_feature (418): n equals a,t,g, or c
cctcgccttcgatgaatatgggcgccctttcctcatcatcaaggatcaggatcgcaagtctcgtcttatgggactggagctctcaagtctcatatcatggcggcaaaggctgtagcaaataccatgagaacatcacttggaccaaatggacttgataaaatgatggtggacaaggacggcgacgtgacggtcacaaacgacggtgccacgattctgagcatgatggatgtcgatcaccagattgccaagctgatggtggagctgtccaaatcccaggatgatgaaatcggagatggggaccacgggggtggttgtcctggccggcgccctgctggaaggaggccgagcagctgctggaccgcggcattcamccgntcaggatcgccgacggttacgagcaggntgcccgcattggccntcgagca

SEQ ID NO: 43 - DNA, 1187 bp, Homo sapiens
  misc_feature (33): n equals a,t,g, or c
  misc_feature (41): n equals a,t,g, or c
  misc_feature (1149): n equals a,t,g, or c
  misc_feature (1156): n equals a,t,g, or c
  misc_feature (1160): n equals a,t,g, or c
tgtgggaactggtgggtcccccgggctggcagnaattgggnacgcgggtcgcggttcttgtttgtggatcgctgtgatcgtcacttgacaatgcagatcttcgtgaagactctgactggtaagaccatcaccctcgaggttgagcccagtgacaccatcgagaatgtcaaggcaaagatccaagataaggaaggcatccctcctgaccagcagaggctgatctttgctggaaaacagctggaagatggkcgcaccctgtctgactacaacatccagaaagagtccaccytgcacctggtrctccgtctcagaggtgggatgcaaatcttcgtgaagacactcactggcaagaccatcacccttgaggtcgagcccagtgacacyatcgagaacgtcaaagcaaagatccargacaaggaaggcattcctcctgaccagcagaggttgatctttgccggaaagcagctggaagatgggcgcaccctgtctgactacaacatccagaaagagtctaccctgcacctggtgctccgtctcagaggtgggatgcagatcttcgtgaagaccctgactggtaagaccatcacyctcgargtggagccgagtgacaccattgagaatgtcaaggcaaagatccaagacaaggaaggcatccctcctgaccagcagaggttgatctttgctgggaaacagctggaagatggacgcaccctgtctgactacaacatccagaaagagtccaccctgcacctggtgctccgtcttagaggtgggatgcagatcttcgtgaagaccctgactggtaagaccatcactctcgaagtggagccgagtgacaccattgagaatgtcaaggcaaagatccaagacaaggaaggcatccctcctgaccagcagaggttgatctttgctgggaaacagctggaagatggacgcaccctgtctgactacaacatccagaaagagtccaccctgcacctggtgctccgtctyagaggtgggatgcagatcttcgtgaagaccctgactggtaagaccatcacyctcgaagtggagccgagtgacaccatygagaatgtcaaggcaagatccagacaaggaaggcatcctcctgaccagcagargttgattttgctgggaaaarcttgnaaatggncgancccttttgattaaaatcccgaaagttc

SEQ ID NO: 44 - DNA, 515 bp, Homo sapiens
  misc_feature (217): n equals a,t,g, or c
  misc_feature (465): n equals a,t,g, or c
ctgcagtaccgtccgaattcccgggtcgacccacgcgtccggtttgagccgtcgtgcttcaccggtctacctcgctagcatgtcgggccgcggcaagactggcggcaaggcccgcgccaaggccaagtcgcgctcgtcgcgcgccggcctccagttcccagtgggccgtgtacaccggctgctgcggaagggccactacgccgagcgcgttggcgcnggcrcgccagtgtacctggcggcagtgctggagtacctcaccgctgagatcctggagctggcgggcaatgcggcccgcgacaacaagaagacgcgaatcatcccccgccacctgcagctggccatccgcaacgacgaggagctcaacaagctgctgggcggcgtgacgatcgcccagggaaggcgtyctgcccaacatccaggccgtgsttgytgcccaagaagaccagcgccaccgtggggccgaangcccttcggggggcaagaaagggcaaccaaggcttcccaaggagtactaa

SEQ ID NO: 45 - DNA, 1499 bp, Homo sapiens
  misc_feature (1476): n equals a,t,g, or c
  misc_feature (1492): n equals a,t,g, or c
gcgagtgcgcgctcctcctcgcccgccgctaggtccatcccggcccagccaccatgtccatccacttcagctccccggcatccgcgaggtcaccattaaccagagcctgctggccccgctgcggctggacgccgacccctccctccagcgggtgcgccaggaggagagcgagcagatcaagaccctcaacaacaagtttgcctccttcatcgacaaggtgcggtttctggagcagcagaacaagctgctggagaccaagtggacgctgctgcaggagcagaagtcggccaagagcagccgcctcccagacatctttgaggcccagattgctggccttcggggtcagcttgaggcactgcaggtggatgggggccgcctggaggcggagctgcggagcatgcaggatgtggtggaggacttcaagaataagtacgaagatgaaattaaccgccgcacagctgctgagaatgagtttgtggtgctgaagaaggatgtggatgctgcctacatgagcaaggtggagctggaggccaaggtggatgccctgaatgatgagatcaacttcctcaggaccctcaatgagacggagttgacagagctgcagtcccagatctccgacacatctgtggtgctgtccatggacaacagtcgctccctggacctggacggcatcatcgctgaggtcaaggcrcagtatgaggagatggccaaatgcagccgggctgaggctgaagcctggtaccagaccaagtttgagaccctccaggcccaggctgggaagcatggggacgacctccggaatacccggaatgagatttcagagatgaaccgggccatccagaggctgcaggctgagatcgacaacatcaagaaccagcgtgccaagttggaggccgccattgccgaggctgaggagcgtggggagctggcgctcaaggatgctcgtgccaagcaggaggagctggaagccgccctgcagcgggccaagcaggatatggcacggcagctgcgtgagtaccaggaactcatgagcgtgaagctggccctggacatcgagatcgccacctaccgcaagctgctggagggcgaggagagccggttggctggagatggagtgggagccgtgaatatctctgtgatgaattccactggtggcagtagcagtggcggtggcattgggctgaccctcgggggaaccatgggcagcaatgccctgagcttctccagcagtgcgggtcctgggctcctgaaggcttattccatccggaccgcatccgccagtcgcaggagtgcccgcgactgagccgcctcccaccactccactcctccagccaccacccacaatcacaagaagattcccacccctgcctcccatgcctggtcccaagacagtgagacagtctggaaagtgatgtcagaatagcttccaataaagcagcstcattctgaggcctgagtgaaaaaaaaaaaaaaaanaaaaaaaaaaattttnggggggg

SEQ ID NO: 46 - DNA, 393 bp, Homo sapiens
  misc_feature (167): n equals a,t,g, or c
  misc_feature (178): n equals a,t,g, or c
  misc_feature (219): n equals a,t,g, or c
  misc_feature (359): n equals a,t,g, or c
  misc_feature (372): n equals a,t,g, or c
  misc_feature (378): n equals a,t,g, or c
tcgacccacgcgtccggcagcctttctgagggagcggttgtgtgttcgccatcttaggaagaagatgttctcgtccgtggcgcatctggccgggcgaaccccttcaacgcgccccacctgcagctggtacacgatggcctcacgggcaccgaagcagccccgtgggnacccccgggcncgccccgaacgttcccgcaatctggcagcagccgctgtggnaagagtacagttgcgaatatggctccatgaagttttatgcactgtgtggctttggtggggtcttaagttgtggtctgacacacactgctgtcgttcctctggatttagtgaaatgccgaatgcargtggacccccagaantacaagggcakwnttaatnggattctcattaaca

SEQ ID NO: 47 - DNA, 238 bp, Homo sapiens
cggatcccggctcctgcatccagtcgccattcgggaggccgctgcgctgcagggcctcgcggaccgcccgcgaccgcgagccgggccctccgcgcggtccatcgcccactggacgccgcccgcggccggaccggttcaacttctcatctttgttcttcttcatatactataggctgtttgctgtggtttagtcaaaaagccatgtagaatgcctgccttttgaagaccacttttaagg

SEQ ID NO: 48 - DNA, 939 bp, Homo sapiens
  misc_feature (937): n equals a,t,g, or c
gccaccatcttggaacgggaggcggagcagagtcgactgggagcgaccgagcgggccgccgccgccgccatgaaccccgaatatgactacctgtttaagctgcttttgattggcgactcaggcgtgggcaagtcatgcctgctcctgcggtttgctgatgacacgtacacagagagctacatcagcaccatcggggtggacttcaagatccgaaccatcgagctggatggcaaaactatcaaacttcagatctgggacacagcgggccaggaacggttccggaccatcacttccagctactaccggggggctcatggcatcatcgtggtgtatgacgtcactgaccaggaatcctacgccaacgtgaagcagtggctgcaggagattgaccgctatgccagcgagaacgtcaataagctcctggtgggcaacaagagcgacctcaccaccaagaaggtggtggacaacaccacagccaaggagtttgcagactctctgggcatccccttcttggagacgagcgccaagaatgccaccaatgtcgagcaggcgttcatgaccatggctgctgaaatcaaaaagcggatggggcctggagcagcctctgggggcgagcggcccaatctcaagatcgacagcacccctgtaaagccggctggcggtggctgttgctagsaggggcacatggagtgggacaggagggggcaccttctccagatgatgtccctggagggggcaggaggtacctccctctccctctcctggggcatttgagtctgtggctttggggtgtcctgggctccccatctccttctggcccatctgcctgctgccctgagccccggttctktmagggtccctaaaggaggacactcagggcctgtggcaggcagggcggaggctgcttgtgctgttgcctctaagtgaatttccaaangc

SEQ ID NO: 49 - DNA, 1771 bp, Homo sapiens
tctgaggctcctggggagtcggtgggaacgacaccagaagctcagatgaagactggcccatttgcagagcactccaaccagctgtggaacatcagcgccgtcccttcctggtccaaagtgaaccagggtctcatccgcatgtataaggccgagtgcctggagaagttccctgtgatccagcacttcaagttcgggagcctgctgcccatccatcctgtcacgtcgggctaggaggggccaagccgaagagccacccaggccacagttcctgtgcctgccttccccaccccagcagtggcccctccccatcccctccctctgttcgtcccgtttgatgagaggctgtttactggggtggggtggcgagatgggcttgagggggctcagagcataaggcttcagggcccaagttgggagaagtgaccaaagtgtagccagttttctgagttcccgtgtgctagactggccagaagagagggtctggggcctggtcactcggccactctctcctgtttctggcctcttctcccttcactcccgtccagtctggttttgagagcaggggctgttctgcagcacckcagggaagggaggagagatacctgctgcttccattgcttttcccttcctggagtcgatgcctttctaagggttggagctgctccttgcaggggcgggtcagtttcccaggccatgccggggtggccatctatgctagggctggaagctgaggctggccgccagctgtgggctggggtggggtgggtggggtcgggtggtggagaggccttagctgtcctggctggtgcccctcccaggctccttttcaccctgccccctgggcctgaggccccctgtgtccaagcctccccctggctcttcagttctctagcccttggctttgctgggtttcctgactgtagccacatctctcccgctccctaagggtaacctagccaatggaagctgccctttgggtaggtgctgggctcctgggagggcccagatgatggggtgaggcatgtctttccagaactttccctggcagggaggggatggcagaaactcagggaggggcttggggcccattgtatctggagagcctggattcctcttggcagtcttaggcccrgccacttctgctacctttgcgctgctgtgagcctcaccctgggcccctgggccctgcttctctgctcccctgggtgatgggtgggcccagaaggtggcagtcccacaccttgtcctcccacctccctgaactgtccattgcttttatagggtgaggtaagwgacagcctcccaagcccaggctttggcactcagaatgggcccagtgggggctgggcaggcccattgagggccaccgccgaggtttctcctagggctgttcctgggcctggctcttacaggctcgtcccccaggcctgcccttctccactgccccctcctgtgtctgggtccacacacccttcaggaagggggagcactgagaagcacagcacaggggctcagcctgggatccggtgatggtctgggcagaggctgggtcaggagtcccaaaggtcagtgacagtttctcagaagaggcccagcgtccacctctctcccagggccagacaccccttcctggctcccccatccccctatggctcccagccccttgcaccctcattgctgttcagattaaagcctctgttttgcacctgtaaaaaaaaaaaaaaaaaaaaaaaaaaaaaaaaaaaaaaaaaaaaaaaaaaaaaaaaatttt

SEQ ID NO: 50 - DNA, 397 bp, Homo sapiens
  misc_feature (201): n equals a,t,g, or c
  misc_feature (207): n equals a,t,g, or c
  misc_feature (352): n equals a,t,g, or c
gggtcgacccacgcgtccgctcgctccgggatcgcccgcgctagagacgcatagcgctctaatcgctcgcacgcaccggccctcgctcgctcgcccgtccgtgccgccgccgcccagcccaccgccaccctttgcagccatgtccaccaggtcygtgtcctcgtcytcctaccgcagatgttcggcggccccggcaccggnagcggnccgagctccacgcgcataacgtgaccagtccacccgcacctacagcctgggcagcgcctgcgccccagcaccagccgcagcctctamamctcgtccccgggcggcgcgtatgttcacggctccttccgcggtgcgcctgcggaanatgttgccccggcgttgcgcttgctggcaggattccgtggaattt

SEQ ID NO: 51 - DNA, 1635 bp, Homo sapiens
  misc_feature (1422): n equals a,t,g, or c
  misc_feature (1617): n equals a,t,g, or c
  misc_feature (1620): n equals a,t,g, or c
  misc_feature (1629): n equals a,t,g, or c
gcccacgcgtccgcccacgcgtccgcccacgcgtccgcctctccagcccttctcctgtgtgcctgcctcctgccgccgccaccatgaccacctccatccgccagttcacctcctccagctccatcaagggctcctccggcctggggggcggctcgtcccgcacctcctgccggctgtctggcggcctgggtgccggctcctgcaggctgggatctgctggcggcctgggcagcaccctcgggggtagcagctactccagctgctacagctttggctctggtggtggctatggcagcagctttgggggtgttgatgggctgctggctggaggtgagaaggccaccatgcagaacctcaatgaccgcctggcctcctacctggacaaggtgcgtgccctggaggaggccaacactgagctggaggtgaagatccgtgactggtaccagaggcaggccccggggcccgcccgtgactacagccagtactacaggacaattgaggagctgcagaacaagatcctcacagccaccgtggacaatgccaacatcctgctacagattgacaatgcccgtctggctgctgatgacttccgcaccaagtttgagacagagcaggccctgcgcctgagtgtggaggccgacatcaatggcctgcgcagggtgctggatgagctgaccctggccagagccgacctggagatgcagattgagaacctcaaggaggagctggcctacctgaagaagaaccacgaggaggagatgaacgccctgcgaggccaggtgggtggtgagatcaatgtggagatggacgctgccccaggcgtggacctgagccgcatcctcaacgagatgcgtgaccagtatgagaagatggcagagaagaaccgcaaggatgccgaggattggttcttcagcaagacagaggaactgaaccgcgaggtggccaccaacagtgagctggtgcagagtggcaagagtgagatctcggagctccggcgcaccatgcaggccttggagatagagctgcagtcccagctcagcatgaaagcatccctggagggcaacctggcggagacagagaaccgctactgcgtgcagctgtcccagatccaggggctgattggcagcgtggaggagcagctggcccagcttcgctgcgagatggagcagcagaaccaggaatacaaaatcctgctggatgtgaagacgcggctggagcaggagattgccacctaccgccgcctgctggagggagaggatgcccacctgactcagtacaagaaagaaccggtgaccacccgtcaggtgcgtaccattgtggaagaggtccaggatggcaaggtcatctcctcccgcgagcaggtccaccagaccacccgctgaggactcagctaccccggccggccacccaggaggcagggangcagccgccccatctgccccacagtctccggcctctccagcctcagccccctgcttcagtcccttccccatgcttccttgcctgatgacaataaagcttgttgactcagctaaaaaaaaaaaaaaaaaaaaaaaaaaaaaaaaaaaaaaaaaaaaaaaaaaaaaaaaaaaaaaaaaaaaaaaaaaaaaaaaaaanttnggggggggncccccc

SEQ ID NO: 52 - DNA, 1780 bp, Homo sapiens
  misc_feature (1780): n equals a,t,g, or c
ccgccgccgccgccgccgccggagctctgtagtatggcatcgaggagaatggagaccaaacctgtgataacctgtctcaaaaccctcctcatcatctactccttcgtcttctggatcactggggtgatcctgctggctgttggagtctggggcaaacttactctgggcacctatatctcccttattgccgagaactccacaaatgctccctatgtgctcatcggaactggcaccactattgttgtctttggcctgtttggatgctttgctacatgtcgtggtagcccatggatgctgaaactgtatgccatgtttctgtccctggtgttcctggctgagctcgtagctggcatttcagggtttgtgtttcgtcatgagatcaaggacaccttcctgaggacttacacggacgctatgcagacttacaatggcaatgatgagaggagccgggcagtggaccatgtgcagcgcasctgagctgctgtggtgtgcagaactacaccaactggagcaccagcccctacttcctggagcatggcatcccccccagctgctgcatgaacgaaactgattgtaatccccaggatctacacaatctgactgtggccgccaccaaagttaaccagaagggttgttatgatctggtaactagtttcatggagactaacatgggaatcatcgctggagtggcgtttggaatcgcattctcccagttaattggcatgctgctggcctgctgtctgtcccggttcatcacggccaatcagtatgagatggtgtaaggagaagtctttcaagaatgacggaataagagacctgttttaaaaaggaactgcagcaatctttgaaagacttccaaagaatgttagagcacagtacataatacacttgccctgctccctctmccccttaccccacaacgtgcaactgacactcccacccagtctctgctccacctttcagcccacgtcacgtgtagtgtccattttgtgaagccctgttgtgccacagagtgtagccaggtccccctgcagctagtcctagtgaacctcaccccgaggccctgcatgggcmrgcccctccatctgtacttggtccaactgcaactcatcatcggtgactggttatcacaccatcgctggcccctttgggccctgcatgtagtgtgggaggctcctgttagctcctcactgtggtaaatgccacacacctttaagtagataagcagacgatagttatctgttcttttgacttaatctcatttggtttgattttccctctactaaggctttcctaccttcttcaggctgcctaagacatgtaacgaaacacttcaataattgtccatgaggagaaaaaaagcatgtgtcatgcatgaaggaaactgaacttgaggtggcctccttgcttgttacatacctgggtatgtgtaggcagtttagtgcatctttgcctctcagttgaaacctgtataaccctgttacaaagctgtgttgttgcttcttgtgaaggccatgatattttgtttttccccaattaattgctattgtgttattttactacttctctctgtattttttcttgcattgacattatagacattgaggacctcatccaaacaatttaaaaatgagtgtgaagggggaacaagtcaaaatatttttaaaagatcttcaaaaataatgcctctgtctagcatgccaacaagaatgcattgatattgtgaacatttgtgatatatgtattaataaatagagcaattacaagcaaaaaaaaatgn

SEQ ID NO: 53 - DNA, 490 bp, Homo sapiens
aattcggcagagaattttcatgagtcgccttcaaaactctcgtgtagggttgacaatgtgggggggtgggggatccagcttattcttttattttcaagtccattcttggggctggtggggaggcaggagaatacccctccctaagcccttagtgtgtgccgagcttgctttgtgatgttggcaggggaggggagacctgggtggtgactgagttccctttatcaaacccttcaatgggcacaaaattgagtgcttgattttaggttttatttttttatgaatgtccaaatctgtgtttccccctgccctcccagactgtgtggccagttgaaagtgtctggtttgtgttcatctctccctcatttctggagcagggcctgagaccctgccacatctcctatgctctgcatccacgcctcttttggacattaaaggttgattgatgcaaaaaaaaaaaaaaaaaaaaaaaaaaaaaaaaaaaaaaaaaaaa

SEQ ID NO: 54 - DNA, 1944 bp, Homo sapiens
  misc_feature (466): n equals a,t,g, or c
  misc_feature (634): n equals a,t,g, or c
  misc_feature (1308): n equals a,t,g, or c
acggtacggaattcccgggtcgacccacgcgtccgaccccggacccggagtcgcggagagctgggcagtgttggccgctggcggagcgctggggcagcatgaagtgcctggtcacgggcggcaacgtgaaggtgctcggcaaggccgtccactccctgtcccgcatcggggacgagctctacctggaacccttggaggacgggctctccctccggacggtgaactcctcccgctctgcctatgcctgctttctctttgccccgctcttcttccagcaataccaggcagccacccctggtcaggacctgctgcgctgtaagatcctgatgaagtctttcctgtctgtcttccgctcactggcgatgctggagaagacggtggaaaaatgctgcatctccctgaatggccggarcagccgcctggtggtccagctgcattgcaagttcggggtgcggaagatcamaanctgtccttcmaggactgtgagtccctgcaggccgtcttcgacccagcctcgtgcccccacatgctccgcgccccagcacgggttctgggggargctgttctgcccttctctcctgcactggctgaagtgacgctgggcattggccgtggcgcaggktcatcctggcantaccacgaggaggaggcagacagcactgccaaagccatggtgactgagatgtgccttggagaggaggatttccagcagctgcaggcccaggaaggggtggccatcactttctgcctcaaggaattccgggggctcctgagctttgcagagtcagcaaacttgaatcttagcattcattttgatgctccaggcaggcccgccatcttcaccatcaaggactctttgctggacggccactttgtcttggccacactctcagacaccgactcgcactcccaggacctgggctccccagagcgtcaccagccagtgcctcagctccaggctcacagcacaccccacccggacgactttgccaatgacgacattgactcttacatgatcgccatggaaaccactataggcaatgagggctcgcgggtgctgccctccatttccctttcacctggcccccagccccccaagagccccggtccccactccgaggaggaagatgaggctgagcccagtacagtgcctgggactcccccacccaagaagttccgctcactgttcttcggctccatcctggcccctgtacgctccccccagggccccagcctgtgctggcggaagacagtgagggtgaaggctgaaccaagaacctgaagcctgtacccagaggccttggactnagacgaagccccagccagtggcagaactgggtctctcagccctggggatcagaaaggtgggcttgctggagctgagctgtttcactgcctctcgcaggccccagctggctgtcactgtaaagctgtcccacagcggtcgggcctgggccgttatctccccacaamccccarccaatcaggactttccagacttggccctgaactactgacgttcctacctcttatttctcattgagcctcaggctatactccagctggccaaggctggaaacctgtctccctcaggctcaccttcctaaggaaaatgtcatagtaggtgctgctggcccctggtgatccagcttctctgccaatcatgacctgttccttcctgaagtcctgggcatgcatctgggacccccgtggagctgacaagttttccttgctttcctgatactctttggcgctgacttggaattctaagagccttggacccgagtgtgtggctagggttgccctggctggggcccggtgccgagactcccaagcggstctgtgcagaagagctgccaggcagtgtcttagatgtragacggaggccatggcgagaatccagctttgacctttattcaagagaccagatgggtttgccccagg

SEQ ID NO: 55 - DNA, 994 bp, Homo sapiens
  misc_feature (896): n equals a,t,g, or c
  misc_feature (971): n equals a,t,g, or c
cccccgtgcgcagtaccgggtccgcgcctgtccccgaaacttcgcaccccgtcgaactctcgcgagagcgktatctgcgtgtcgggacgtgcggaggctctcactttccgtcatggcgctgaaggtagcgaccgtcgccggcagcgccgcgaaggcgtgctcgggccagcccttctctgccgtccctgggaggttctaggcgcccacgaggtcccctcgaggaacatcttttcagaacaaacaattcctccgtccgctaagtatggcgggcggcacacggtgaccatgatcccaggggatggcatcgggccagagctcatgctgcatgtcaagtccgtcttcaggcacgcatgtgtaccagtggactttgaagaggtgcacgtgagttccaatgctgatgaagaggacattcgcaatgccatcatggccatccgccggaaccgcgtggccctgaagggcaacatcgaaaccaaccataacctgccaccgtcgcacaaatctcgaaacaacatccttcgcaccagcctggacctctatgccaacgtcatccactgtaagagccttccaggcgtggtgacccggcacaaggacatagacatcctcattgtccgggagaacacagagggcgagtacagcagcctggagcatgagagtgtggcgggagtggtggagagcctgaagatcatcaccaaggccaagtccctgcgcattgccgagtatgccttcaagctggcgcaggagagcgggcgcaagaaagtgacggccgtgcacaaggccaacatcatgaaactgggcgatgggcttttcctccagtgctgcagggaggtggcagcccgytaccctcagwtcaccttcgagaacatgattgtggataacaccaccatgcagctggtgtnccggccccagcagtttgatgtcatggtgatgcccaatctctatggcaacatcgtcaaacaatgtctgcgcgggantggtcgggggcccaagcttgttg

SEQ ID NO: 56 - DNA, 328 bp, Homo sapiens
  misc_feature (123): n equals a,t,g, or c
  misc_feature (156): n equals a,t,g, or c
  misc_feature (170): n equals a,t,g, or c
gggtcgacccacgcgtccgcccacgcgtccggatgacttcattgccaaagttgttcaaaggtagccttggccctttttcatctgagtcccatttagagatgtataaagaatgttgttgagtanggcgcggtggctcacgcctgtaatccccacacnttgggaaggccgangcaggcggatcacgaggtcagaagattgagaccattctggctaacatggtgaacccccatctctactaaaaatacaaaaattagtcaggcgcgatggcgggcacatgtagtaccagctactcgggaggctgatgcagaagaataacttggaacctggg

SEQ ID NO: 57 - DNA, 1489 bp, Homo sapiens
  misc_feature (710): n equals a,t,g, or c
  misc_feature (1109): n equals a,t,g, or c
  misc_feature (1117): n equals a,t,g, or c
  misc_feature (1206): n equals a,t,g, or c
  misc_feature (1211): n equals a,t,g, or c
  misc_feature (1218): n equals a,t,g, or c
  misc_feature (1264): n equals a,t,g, or c
  misc_feature (1311): n equals a,t,g, or c
  misc_feature (1446): n equals a,t,g, or c
  misc_feature (1467): n equals a,t,g, or c
cggcacgaggggtggtgtgggtgtgtttagaaaaaagatgcattcctgaagatctctggtgctgaagggcctcgagttcctttcagagactgtatttgacacactttaggtacacacaaacgaatggtatcacatgcaatattttaatggagcaatgggagaggctctttgaaatggggtttgcatctttttgtaacattttgatttctctggtgccttattcctacttgatgctggcactcacatacccacaagaagctgacacagaagtcagccttaggcgtggggacatatgggtgatgtttgagcatgcaggggccatggggagtttggtgtcagttggtggagaagggactagatggcatctcttagccgaggccaacaggaactgcacaagtccattatagtcaaagttagcaattttgatacgtaaacacaatacttcattcttcctcatctgagctttccttccttcttccttttctatctctaccttctcataaaggtgctgctgctgctgctaaggtgcccggagtccagaatgtccattaatcactcaggcacgagcctggcactgccacgtcagcccccagcatgaccaaacccaggtttctcttgcttggggctgagaactgtcagatttttctcatcaaaaatgttttccaaggaatcagtggattacagtttttctgcattgaaaatgcactttnaaaaaataaattaaagctccagactgtttaaaatatacagagggagcaggggaaagttaagcatgtgctagtgtctgaacccagttcagtttatctccagttgaaacgatatacactatattatgtataaatgtatacacacttcctatatgtatccacatatatatagtgtatatattatacatgtataggtgtgtatatgtgcatatatacacacatgcacataacaaaatcagatgctcattacaaatccagatgctcattacaaaaccagatgctacacaaacagcagcagaggaaacaaggttggactcttgcaacagatcacaaaaaataaaaacagctacttgcagtgactttggtcatttctgtatgttcataaagaatggatttgtaacnaggaaaanaaggaccagtgttagtgaaaagggaagatggggcgaaccatcttgatccgatgcgaatccgtaatggtctatatacatttcatcagtantcatntagtcangtgattgattcagttctgctatgaaacattgtaacacgtacccacnactgacaactactcgtgagcgttcattaggagtgacctaactttgcntgcctgctcatgggacgagctccttaggtggagataccggggaatagagaaagatgcacgtctctgcgttgtcgcgtgctttgaggggcggtctttaccttccgtgttggagtcctccctgagtccggcgctggntgcgggacacggcccttctcngtgtcccaggcgctgcctcatt

SEQ ID NO: 58 - DNA, 1283 bp, Homo sapiens
  misc_feature (38): n equals a,t,g, or c
  misc_feature (550): n equals a,t,g, or c
  misc_feature (1242): n equals a,t,g, or c
  misc_feature (1250): n equals a,t,g, or c
  misc_feature (1260): n equals a,t,g, or c
  misc_feature (1263): n equals a,t,g, or c
aggtaatttgaattgagagagagtaagtgacttgctgnaaaaagggttaatcaacagcagagctgggatttgaacccataactctgtcaaagcctccactcctaactcctgttcatgctcctgtggagaaaatgcttgtagtaacatattttaaatgtactaacaagaccagtcatgggmaaatgtttctgagacaaatctctagtttatgatttaaaacagtacgttttcttacgtgacgaaaacaaaaagtgtgttaatttgttcccagtggttgaagttatttgccaacaattttactgtttctcttcatctgtttataggatttctctgcctcttccaaacttttcctccctgaacctgaggggtaagcattttatttccctttaggaaaaacgtcagctgcttgtaaccactgtgtttatgtcaaagcattcattttttttaggatatctgaaaaaatgccatataagaraaaamtctataaaacatctatwattttcgaacccaagtacactcttgcattctawgctttaagttaaatgcaaantcctttttccttcttcctgctgcaagtactatctcatcctgatgctcaagagtgtcagggcctgggtttccaaacagagactaccctaaaattatttggcgagtagtactttacacaattgcctctcccccacaaatcataattgtttcagtaaaatggttacttggtttttccaagaaaaaactcgtttttactcatttttggcctgtttgtttatttagaaactaatctggattcactccctctggttgatacccactcaaaaaggacacttctgattaagacggttgaaactagagatggacaggttatcaacgaaacttctcagcatcacgatgaccttgaataaaaattgcacacactcagtgcagcaatatattaccagcaagaataaaaaagaaatccatatcttaaagaaacagctttcaagtgcctttctgcagtttttcaggagcgcaagatagatttggaataggaataagctctagttcttaacaaccgacactcctacaagatttagaaaaaagtttacaacataatctagtttacagaaaaatcttgtgctagaatactttttaaaaggtattttgaataccattaaaactgcttttttttttccagcaagtatccaaccaacttggttctgcttcaataaatctttggaaaaactmaaaaaaaaaaaaaaaaaammngggggggngcccggggtnccnccggggggcccaagttttac

SEQ ID NO: 59 - DNA, 740 bp, Homo sapiens
  misc_feature (696): n equals a,t,g, or c
agaaggagcgcggggaggacgtaccttgtgagatgcgagccggccaacagcttgcaagcatgctccgctggacccgagcctggaggctcccgcgtgagggactcggcccccacggccctagcttcgcgagggtgcctgtcgcacccagcagcagcagcggcggccgagggggcgccgagccgaggccgcttccgctttcctacaggcttctggacggggaggcagccctcccggccgtcgtctttttgcacgggctcttcggcagcaaaactaacttcaactccatcgccaagatcttggcccagcagacaggccgtaggtgctgacggtggatgctcgtaaccacggtgacagcccccacagcccagacatgagctacgagatcatgagccaggacctgcaggaccttctgccccagctgggcctggtgccctgcgtcgtcgttggccacagcatgggaggaaagacagccatgctgctggcactacagaggccagagctggtggaacgtctcattgctgtagatatcagcccagtggaaagcacaggtgtctcccactttgcaacctatgtggcagccatgagggccatcaacatcgcagataggcttgccccgctcccgtgcccgaaaactggcggatgaacagctcagttctgtcatccaggacatggccgtgcggcacacttgcttcaatnaacctggtagaggtagacgggcgttttcgtgttggagggtggaa

SEQ ID NO: 60 - DNA, 1291 bp, Homo sapiens
  misc_feature (6): n equals a,t,g, or c
  misc_feature (7): n equals a,t,g, or c
  misc_feature (147): n equals a,t,g, or c
  misc_feature (1211): n equals a,t,g, or c
  misc_feature (1283): n equals a,t,g, or c
actttnncccctccccctttcctttcccgtctcacgcgccaggccgcttgcacatgcgcattaggtacaaagcctcgctctttgtccccatctgtcgttcacacgaactcaagcctttggcattcggcagccaatagaatctaaganatggcggaaaaatgattccgcctcgggagctaaacttgattggcagtttagctaaccaatcgagaacgccatttgtamcccttggcaggcamcgagctccgtcgtctcgtttccggcggtcgcgcgctcttttctcgggacgggagaggccgtgtagcgtcgccgttactccgaggagataccagtcggtagaggagaagtcgaggttagagggaactgggaggcactttgctgtctgcaatcgaagttgagggtgcaaaaatgcagagtaataaaacttttaacttggagaagcaaaaccatactccaagaaagcatcatcaacatcaccaccagcagcagcaccaccagcagcaacagcagcagccgccaccaccgccaatacctgcaaatgggcaacaggccagcagccaaaatgaaggcttgactattgacctgaagaattttagaaaaccaggagagaagaccttcacccaacgaagccgtctttttgtgggaaatcttcctcccgacatcactgaggaagaaatgaggaaactatttgagaaatatggaaaggcaggcgaagtcttcattcataaggataaaggatttggctttatccgcttggaaacccgaaccctagcggagattgccaaagtggagctggacaatatgccactccgtggaaagcagctgcgtgtgcgctttgcctgccatagtgcatcccttacagttcgaaaccttcctcagtatgtgtccaacgaactgctggaagaagccttttctgtgtttggccaggtagagagggctgtagtcattgtggatgatcgaggaaggccctcaggaaaaggcattgttgagttctcagggaagccagctgctcggaaagctctggacagatgcagtgaaggctccttcctgctaaccacatttcctcgtcctgtgactgtggagcccatggaccagttagatgatgaagagggacttccagagaagctggttataaaaaaccagcaatttcacaaggaacgagagcagccacccagatttgcacagcctggctcctttkgagtatgaatatngccatgcgctgggaaggcactcattgagatggagaaagcagcctggggtgacaagaagtgaagactcctgtntccaaaaa

SEQ ID NO: 61 - DNA, 971 bp, Homo sapiens
  misc_feature (856): n equals a,t,g, or c
  misc_feature (886): n equals a,t,g, or c
ctgcagtaccggtccggaattcccgggtcgacccacgcgtccgggtctgtggtcctctctcggctcctcgcggctcgcggcggccgacggttcctgggacacctgcttgcttggcccgtccggcggctcagggcttctctgctgcgctcccggttcgctggacgggaagaagggctgggccgtcccgtcccgtccccatcggaaccccaagtcgcgccgctgacccgtcgcagggcgagatgagcgcggacgcagcggccggggcgcccctgccccggctctgctgcctggagaagggtccgaacggctacggcttccacctgcacggggagaagggcaagttgggccagtacatccggctggtggagcccggctcgccggccgagaaggcggggctgctggcgggggaccggctggtggaggtgaacggcgaaaacgtggagaaggagacccaccagcaggtggtgagccgcatccgcgccgcactcaacgccgtgcgcctgctggtggtcgaccccgagacggacgagcagctgcagaagctcggcgtccaggtccgagaggagctgctgcgcgcccaggaagcgccggggcaggccgagccgccggccgccgccraggtgcagggggctggcaacgaaaatrarcctcgcraggccgacaagagccacccggagcagcgcgagcttcggcctcggctctgtaccatgaagaagggccccagtggctatggcttcaacctgcacagcgacaagtccaagccaggccagttcatccggtcagtggacccagactccccggctgaggcttcagggctccgggcccaggatcgcattgtggaggtgatgcttctcgnttctcttcctatctgaactgcccccaaccnctgcagattagcagcaccttggggcagccatcataccatcatggggtttgattagcccacgggcattagccaacctgggaggttg

SEQ ID NO: 62 - DNA, 618 bp, Homo sapiens
  misc_feature (563): n equals a,t,g, or c
  misc_feature (598): n equals a,t,g, or c
gggtcgacccacgcgtccggcagaaatgaaggaccacctgccaagacgaagagctgggtgggacccacgctgcattttcatcgaaagagtgaacatctagtgggactgaaagttctttgttgtttcagattgtagagtgtgattgatggaattggtctgtggaaattgcattgtttttatttctttatgtaatcagtttaagtaatagggggtatatataatcgtaagtattttagggtgggaggggctattaagtaattaagtgggtggggttagtttaaaagttagcatgatatgtattagataactctataagtggacatgtgtacttacttgtgatcctttaccctatgattgctacccttaacgatttcaaataaactcagagggaactgcagggagatcaaaccatttagggcaaattggacatgaataaaactctagtgggaaaaagttcaaaggtgattgaataaataatttaactttgccctgggtattaagtccagggctcccagattgtggagcagagccttggagagtacaggatgaaggagatagatgcncctttgacttgccgggaatgaaattggattaatgnaaggatggtaaataattcca

SEQ ID NO: 63 - DNA, 1138 bp, Homo sapiens
  misc_feature (7): n equals a,t,g, or c
  misc_feature (15): n equals a,t,g, or c
  misc_feature (22): n equals a,t,g, or c
  misc_feature (27): n equals a,t,g, or c
  misc_feature (29): n equals a,t,g, or c
  misc_feature (1123): n equals a,t,g, or c
tctatanatcatganaggaaanggtancngacagtacggtcggattcccgggtcgacccacgctccgatgacttcacccctctggagatcctctggaccttctccatctacctggagtcagtggccatcttgccgcagctgttcatggtgagcaagaccggcgaggcggagaccatcaccagccactacttgtttgcgctaggcgtttaccgcacgctctatctcttcaactggatctggcgctaccatttcgagggcttcttcgacctcatcgccattgtggcaggcctggtccagacagtcctctactgcgatttcttctacctctatatcaccaaagtcctaaaggggaagaagttgagtttgccggcatagccccggtcctctccatctctctcctcggcagcagcgggaggcagaggaaggcggcagaagatgaagagctttcccatccaggggtgacttttttaagaacccacctcttgtgctccccatcccgcctcctgccgggtttcagggggacagtggaggatccaggtcttggggagctcaggacttgggctgtttgtagttttttgccttttagacaagaaaaaaaaatctttccactctttagtttttgattctgatgactcgtttttcttctactctgtggccccaatttttataaagtgtttttgagtgtcctatgggccggggcagggtccaagatcttttcccttccccaggcccctcggctccctcccagatcccacccccagccccactggttgccaaacactaaatctgccgacacccatctgccccacctcctgccatggccatgaaccgcgacccccactaaatttctagattggggatagggagaaagggaggcccaggaaggtctcccctgattttttttcatagtaatttttttccccagagtttgaattttttggtcttctcctggttttttggcaaattaggggggcccggggctcaagtgcgggaagggggctggcccgaggatcccatggctctcacaccatgtttttgtacagaactgatggttgaatctttgttctcttgaaataaacagaagaaaatgaaaccttaaaaaaaaaaaaaaaaaaaaaaaacncgggggggggcccgg

SEQ ID NO: 64 - DNA, 418 bp, Homo sapiens
  misc_feature (365): n equals a,t,g, or c
  misc_feature (371): n equals a,t,g, or c
  misc_feature (380): n equals a,t,g, or c
  misc_feature (391): n equals a,t,g, or c
tgctcatccagaggagctcaccacagtcactgcgacagactgccacactcaccctggcctggcctcagagaagttgagctactggcctcagttcacacagagcagatggaggaagagctggcactaggacccagggggcaggggggagcctccctggctggaagggatggcaggagcgctggtgcaggtagctatggagctctggccaactctgcctggggaggtcccaggaaggtggcgtcagcatctgcagccgcgtcgacgttgtcggagcctccgcggaggacccaggagagccggactaggaccagggccctgggcctccccacactccccatggagaagctggcggcctctaacagagncccaangggcttggncggtcctgggncgtgaaaatgttcaagtgcccgattga

SEQ ID NO: 65 - DNA, 2836 bp, Homo sapiens
  misc_feature (2834): n equals a,t,g, or c
  misc_feature (2836): n equals a,t,g, or c
aagaaaccgcccattacacaccccagtacaccagcagaggaaacttataacctcgggaggcaggtccttcccctcagtgcggtcacatacttccagaagagcggaccagggctgctgccagcacctgccactcagagcgcctctgtcgctgggacccttcagaactctctttgctcacaagttaccaaaaaaaaaagagccaacatgttggtattgctggctggtatctttgtggtccacatcgctactgttattatgctatttgttagcaccattgccaatgtctggttggtttccaatacggtagatgcatcagtaggtctttggaaaaactgtaccaacattagctgcagtgacagcctgtcatatgccagtgaagatgccctcaagacagtgcaggccttcatgattctctctatcatcttctgtgtcattgccctcctggtcttcgtgttccagctcttcaccatggagaagggaaaccggttcttcctctcaggggscaccacactggtgtgctgsctgtgcattcttgtggggtgtccatctacactagtcattatgcgaatcgtgatggaacgcatatgcaccacggctattcctacatcctgggctggatctgcttctgcttcagcttcatcatcggcgttctctatctggtcctgagaaagaaataaggccggacgagttcatggggatctggggggtggggaggaggaagccgttgaatctgggagggaagtggaggttgctgtacaggaaaaaccgagataggggaggggggagggggaagcaaaggggggaggtcaaatcccaaaccattactgaggggattctctactgccaagcccctgccctggggagaaagtagttggctagtactttgatgctcccttgatggggtccagagagcctccctgcagccaccagacttggcctccagctgttcttagtgacacacactgtctggggccccatcagctgccacaacaccagccccacttctgggtcatgcactgaggtccacagacctactgcactgagttaaaatagcggtacaagttctggcaagagcagatactgtctttgtgctgaatacgctaagcctggaagccatcctgcccttctgacccaaagcaaaacatcacattccagtctgaagtgcctactggggggctttggcctgtgagccattgtccctctttggaacagatatttagctctgtggaattcagtgacaaaatgggaggaggaaagagagtttgtaaggtcatgctggtgggttagctaaaccaagaaggagaccttttcacaatggaaaacctgggggatggtcagagcccagtcgagacctcacacacggctgtccctcatggagacctcatgccatggtctttgctaggcctcttgctgaaagccaaggcagctcttctggagtttctctaaagtcactagtgaacaattcggtggtaaaagtaccacacaaactatgggatccaaggggcagtcttgcaacagtgccatgttagggttatgtttttaggattcccctcaatgcagtcagtgtttcttttaagtatacaacaggagagagatggacatggctcattgtagcacaatcctattactcttcctctaacatttttgaggaagttttgtctaattatcaatattgaggatcagggctcctaggctcagtggtagctctggcttagacaccacctggagtgatcacctcttggggaccctgcctatcccacttcacaggtgaggcatggcaattctggaagctgattaaaacacacataaaccaaaaccaaacaacaggcccttgggtgaaaggtgctatataattgtgaagtattaagcctaccgtatttcagccatgataagaacagagtgcctgcattcccaggaaaatacgaaaatcccatgagataaataaaaatataggtgatgggcagatcttttctttaaaataaaaaagcaaaaactcttgtggtacctagtcagatggtagacgagctgtctgctgccgcaggagcacctctatacaggacttagaagtagtatgttattcctggttaagcaggcattgctttgccctggagcagctattttaagccatctcagattctgtctaaaggggttttttgggaagacgttttctttatcgccctgagaagatctaccccagggagaatctgagacatcttgcctacttttctttattagctttctcctcatccatttcttttatacctttcctttttggggagttgttatgccatgatttttggtatttatgtaaaaggattattactaattctatttctctatgtttattctagttaaggaaatgttgagggcaagccaccaaattacctaggctgaggttagagagattggccagcaaaaactgtgggaagatgaactttgtcattatgatttcattatcacatgattatagaaggctgtcttagtgcaaaaaacatacttacatttcagacatatccaaagggaatactcacattttgttaagaagttgaactatgactggagtaaaccatgtattcccttatcttttactttttttctgtgacatttatgtctcatgtaatttgcattactctggtggattgttctagtactgtattgggcttcttcgttaatagattatttcatatactataattgtaaatattttgatacaaatgtttataactctagggatataaaaacagattctgattcccttcattgtgtgaatgtttttttctaaaaaaaatgtggagaaatatggataattatgacatttatccctcattaaagcngn

SEQ ID NO: 66 - DNA, 2305 bp, Homo sapiens
  misc_feature (1973): n equals a,t,g, or c
aaacgttcccggtccttcctgaaccaagctgtggaccctcgtaagcaacccggacaccgacgcgctcatctgctggagcccgagcgsgaacagcttccacgtgttcgaccagggccagtttgccaaggaggtgctgcccaagtacttcaagcacaacaacatggccagcttcgtgcggcagytcaacatgtatggcttccggaaagtggtccacatcgagcagggcgkcctggtcaagccagagagagacgacacggagttccagcacccatgcttcctgcgtggccaggagcagctccttgagaacatcaagaggaaagtgaccagtgtgtccaccctgaagagtgaagacataaagatccgccaggacagcgtcaccaagctgctgacggacgtgcagctgatgaaggggaagcaggagtgcatggactccaagctcctggccatgaagcatgagaatgaggctctgtggcgggaggtggccagccttcggcagaagcatgcccagcaacagaaagtcgtcaacaagctcattcagttcctgatctcactggtgcagtcaaaccggatcctgggggtgaagagaaagatccccctgatgctgaacgacagtggctcagcacattccatgcccaagtatagccggcagttctccctggagcacgtccacggctcgggcccctactcggccccctccccagcctacagcagctccagcctctacgcccctgatgctgtggccagctctggacccatcatctccgacatcaccgagctggctcctgccagccccatggcctcccccggcgggagcatagacgagaggcccctatccagcagccccctggtgcgtgtcaaggaggagccccccagcccgcctyagagcccccgggtagaggaggcgagtcccgggsgcccatcttccgtggacaccctcttgtccccgaccgccctcattgactccatcctgcgggagagtgaacctgcccccgsctccgtcacagccctcacggacgccaggggccacacggacaccgagggccggcctccctcccccccgcccacctccacccctgaaaagtgcctcagcgtasctgcctggacaagaatgagctcagtgaccacttggatgctatggactccaacctggataacctgcagaccatgctgagcagccacggcttcagcgtggacaccagtgccctgctggacctgttcagcccctcggtgaccgtgcccgacatgagcctgcctgaccttgacagcagcctggccagtatccaagagctcctgtctccccaggagccccccaggcctcccgaggcagagaacagcagcccggattcagggaagcagctggtgcactacacagcgcagcgctgttcctgctggaccccggctccgtggacaccgggagcaacgacctgccggtgctgtttgagctgggagagggctcctacttctccgaagggacggcttcgcaagggaccccaccatctccctgctgacaggctcggagcctcccaaagccaaggaccccactgtctcctagaggccccggaggagctgggccagccgcccacccccacccccagtgcagggctggtcttggggaggcagggcagcctcgcggtcttgggcactggtgggtcggccgccatagccccagtaggacaaacgggctcgggtctgggcagcacctctggtcaggagggtcaccctggcctgccagtctgccttcccccaaccccgtgtcctgtggtttggttgggcttcacagccacacctggactgaccctgcaggttgttcatagtcagaattgtattttggatttttacacaactgtcccgttccccgctccacagagatacacagatatatacacacagtggatggacggacaagacaggcagagatctataaacagacaggctctatgctatggcctccatgtgtttcctctgtcccaggntggtgcggtggttggtgctgcaatgaggaggggcccagggcacagaagggccgggctgcagtggcctcctgggggaagacggatgttgcagctagctccgtgcctgcccgactccccaggaccagcatgtgcttgcagttctttattgagggaccaggggtgggcgcctcaccttggccctgggggtctctggttgtcacaggaccaccaggaacccccttcccaaggtgttcgcactcggacaggtgatgcggggcgggcacactgtctttctgccagagccagcaccctgtgtaggcacggggaacgggagcctgtcccgtagctttagg

SEQ ID NO: 67 - DNA, 1907 bp, Homo sapiens
  misc_feature (1221): n equals a,t,g, or c
  misc_feature (1655): n equals a,t,g, or c
  misc_feature (1896): n equals a,t,g, or c
  misc_feature (1904): n equals a,t,g, or c
gacgcccgccgcctcactgtttctagccttcagtggccaacgttggtagtcattgtgacctcagcctgaaaatccctgaaattagcatccaggatatgacagcccaggtgaccagcccatcgggcaagacccatgaggccgagatcgtggaaggggagaaccacacctactgcatccgctttgttcccgctgagatgggcacacacacagtcagcgtgaagtacaagggccagcacgtgcctgggagccccttccagttcaccgtggggcccctaggggaagggggagcccacaaggtccgagctgggggccctggcctggagagagctgaagctggagtgccagccgaattcagtatctggacccgggaagctggtgctggaggcctggccattgctgtcgagggccccagcaaggctgagatctcttttgaggaccgcaaggacggctcctgtggtgtggcttatgtggtccaggagccaggtgactacgaagtctcagtcaagttcaacgaggaacacattcccgacagccccttcgtggtgcctgtggcttctccgtctggcgacgcccgccgcctcactgtttctagccttcaggagtcagggctaaaggtcaaccagccagcctcttttgcagtcagcctgaacggggccaagggggcgatcgatgccaaggtgcacagcccctcaggagccctggaggagtgctatgtcacagaaattgaccaagataagtatgctgtgcgcttcatccctcgggagaatggcgtttacctgattgacgtcaagttcaacggcacccacatccctggaagccccttcaagatccgagttggggagcctgggcatggaggggacccaggcttggtgtctgcttacggagcaggtctggaaggcggtgtcacagggaacccagctgagttcgtcgtgaacacgagcaatgcgggagctggtgccctgtcggtgaccattgacggcccctccaaggtgaagatggattgccaggagtgccctgagggctaccgcgtcacctatacccccatggcacctggcagctacctcatctccatcaagtacggcggcccctaccacattgggggcagccccttcaaggccaaagtcacaggcccccgtctcgtcagcaaccacagcctccacgagacatcatcagtgtttgtagactctctgaccaaggccacctgtgccccccagcatgggnccccgggtcctgggcctgctgacgccagcaaggtggtggccaagggctggggctgagcaaggcctacgtaggccagaagagcagcttcacagtagactgcagcaaagcaggcaacaacatgctgctggtgggggttcatggcccaaggaccccctgcgaggagatcctggtgaagcacgtgggcagccggctctacagcgtgtcctacctgctcaaggacaagggggagtacacactggtggtcaaatggggggacgagcacatcccaggcagcccctaccgcgttgtggtgccctgagtctggggcccgtgccagccggcagcccccaagcctgccccgctacccaagcagccccgccctcttcccctcaaccccggcccaggccgccctggccgcccgcctgtcactgcagccgcccctgccctgtgccgtnctgcgctcacctgcctccccagccagccgctgacctctcggctttcacttgggcagagggagccatttggtggcgctgcttgtcttctttggttctgggaggggtgagggatgggggtcctgtacacaaccacccactagttctcttctccagccaagaggaataaagttttgcttccattcwmaaaaaaaaaaaaaaaaaaaaatyggggggggkccgktaacccaattggcctttaagngggtggtntta

SEQ ID NO: 68 - DNA, 815 bp, Homo sapiens
gggtcgacccacgcgtccgttttttttaagtgtgaattttttattgagataaacaacagcataaagaatacaagtagccaaatggttttgaaaaaccaaattaggtcaaagttctaaattaaaaatagcagttgtgtttcaatttaccttattctagcaattwaagtwggtaacatacaaatagttatwctgatacaagatattaaagacatactcagttttaatcaactacctctcaagaaacagtagggcctctgtaaaattggagactgataggttgatcagaaactcaccctaaatctgaacgggtgccgctataatttgtgacatctggcaagatttccctttatgtatatattttaacaatccgcttggacacgaacaaagccacacttctaactgcttctggcgaactgattttatttttaatttttttcaataaagatattcttagatactgaaagaaatagttaatgagtttgcatttgtgcttgagaaaatttggctcaagtccatttggctgtagtgtcaacgatgtttccagtagtgtttagatttggtgtcttcaaaggtagttgattaaaaccaagtgtgtctttaatatcttgtatcagaataactttgtatgttaccaacttaaattgctagaataaggtaaattgatacacaactgctatttttaatttagaactttgacctaatttgggttttcaaaaccattttggctacttgtattctttatgctgttgtttatttcaataaaaaattcacacctaaatgtatacttactaaaaaaaaaaaaaaaaaaaaactcg

SEQ ID NO: 69 - DNA, 1150 bp, Homo sapiens
  misc_feature (14): n equals a,t,g, or c
  misc_feature (20): n equals a,t,g, or c
  misc_feature (23): n equals a,t,g, or c
  misc_feature (25): n equals a,t,g, or c
  misc_feature (1150): n equals a,t,g, or c
ctcgtgcaattcgngcagantgntncctggcctccttttgcttgcccgtggctgttcctcctgggtcctcttgccctgggctggatgccttcttcggctccccctctgcatgtgataacttggggtggcccttggagctgtgccaaagctacacctcggggtcctagtctcaactggcctgcgtactgctgtgggctcaccccgccttcctcccacagccctgggcgctgcctatggcacagccaagagcggtaccggcattgcggccatgtctgtcatgcggccggagcagatcatgaagtccatcatcccagtggtcatggctggcatcatcgccatctacggcctggtggtggcagtcctcatcgccaactccctgaatgacgacatcagcctctacaagagcttcctccagctgggcgccggcctgagcgtgggcctgagcggcctggcagccggctttgccatcggcatcgtgggggacgctggcgtgcggggcaccgcccagcagccccgactattcgtgggcatgatcctgattctcatcttcgccgaggtgctcggcctctacggtctcatcgtcgccctcatcctctccacaaagtagaccctctccgagcccaccagccacagaatattatgtaaagaccacccctcctcattccagaacgaacagcctgacacatacgcacggggccgccgcccccagtagttggtcttgtacatgcgcagtgtcctagtgcccatcgtctgtttccccggccttgcccccgcccgccccgtgccgtggacatctgggcccactcatcgcccctccaggcccccggcgccccaccccctagagtgctctgtgtatgcggatgatttagaattgtcatttctctttactggatgtttatttataaagatctggcctgttcctgcgtctgcggagcggcccttgtctcccagctatctataaccttagctagagtgtcgccttgtgggttcctgttgctgagacttcctggatggagccgccctcaccgccgggcccgtggccctgcgcggagctgtgtccaataaagttcttggatgtgaaaaaaaaaaaaaaaaaaaaaaaaaaaraaaaraaaaaaaaaaaraaaraaaaraaaawaagaaaaaaaan

SEQ ID NO: 70 - DNA, 344 bp, Homo sapiens
  misc_feature (287): n equals a,t,g, or c
  misc_feature (333): n equals a,t,g, or c
  misc_feature (339): n equals a,t,g, or c
cgcaggctctgcggccgggttccttccgcgggacggggagaaagagagagcgcgaaagagagaggatgtctctctcagattggcacctggcggtgaagctggctgaccagccacttgccccaaagtctattctccagttgccagagtcagagctgggtgaatactctctggggggctacagtatttcatttctgaaacagctcattgctggcaaactccaggagtcggttccagaccctgagctgattgatctgatatactgtggccggaagcttaaagatgaccanaccttgacttctacggtattcaacctggctccacatccatgttctncggaantcctg

SEQ ID NO: 71 - DNA, 448 bp, Homo sapiens
  misc_feature (425): n equals a,t,g, or c
tcgacccacgcatccgaagatgttcttgctgccccttccggctgccgggcgagtcgtcctccgacgtctgggcgtgaacagttctgggcacggggtctcgccgccgcagacatgacgaagggtcttgttttaggaatctatagtaaagacaaagaagatgatgtgccacagtttacgagtgcaggagagaatttcgataaattggtgtctggaaagttgagagaaattttgaacatatctggacctcctctgaaagcaggcaaaacccgaaccttttatggtctgcatgaggacttccccagcgtggtggtggtcggcctcggcagaaaggcagctggagtcgatgaccaggaaaactggcmtgaaggcaaagaaaacatcagagtcgccatgcaacggggtgcaggcaggttccaagacctggnaatctcttctgtggaaggtggat

SEQ ID NO: 72 - DNA, 2825 bp, Homo sapiens
  misc_feature (1809): n equals a,t,g, or c
  misc_feature (2093): n equals a,t,g, or c
gagaaggaggtcgcgcggcctcatcccgggccgcgccccaggccgccgccggccccgcgctcatgaggttgctcgcgcgcccccgccgatcgccatggatcggatgaagaagatcaaacggcagctgtcaatgacactccgaggtggccgaggcatagacaagaccaatggtgcccctgagcagataggcctggatgagagtggtggtggtggcggcagtgaccctggagaggcccccacacgtgctgctcctggggaacttcgttctgcacggggcccactcagctctgcaccagagattgtgcacgaggacttgaagatggggtctgatggggagagtgaccaggcttcagccacgtcctcggatgaggtgcagtctccagtgagagtgcgtatgcgcaaccatcccccacgcaagatctccactgaggacatcaacaagcgcctatcactaccagctgacatccggctgcctgagggctacctggagaagctgaccctcaatagccccatctttgacaagcccctcagccgccgcctccgtcgtgtcagcctatctgagattggctttgggaaactggagacctacattaagctggacaaactgggcgagggtacctatgccaccgtctacaaaggcaaaagcaagctcacagacaaccttgtggcactcaaggagatcagactggaacatgaagagggggcaccctgcaccgccatccgggaagtgtccctgctcaaggacctcaaacacgccaacatcgttacgctacatgacattatccacacggagaagtccctcacccttgtctttgagtacctggacaaggacctgaagcagtacctggatgactgtgggaacatcatcaacatgcacaacgtgaaactgttcctgttccagctgctccgtggcctggcctactgccaccggmagaaggtgctacaccgagacctcaagccccagaacctgctcatcaacgagaggggagagctcaagctggctgactttggcctggcccgagccaagtcaatcccaacaaagacatactccaatgaggtggtgacactgtggtaccggccccctgacatcctgcttgggtccacggactactccactcagattgacatgtggggtgtgggctgcatcttctatgagatggccacaggccgtcccctctttccgggctccacggtggaggaacagctacacttcatcttccgtatcttaggaaccccaactgaggagacgtggccaggcatcctgtccaacgaggagttcaagacatacaactaccccaagtaccgagccgaggcccttttgagccacgcaccccgacttgatagcgacggggccgacctcctcaccaagctgttgcagtttgagggtcgaaatcggatctccgcagaggatgccatgaaacatccattcttcctcagtctgggggagcggatccacaaacttcctgacactacttccatatttgcactaaaggagattcagctacaaaaggaggccagccttcggtcttcgtcgatgcctgactcaggcaggccagctttccgcgtggtggacaccgagttctaagccacagaccgaggccccagcaggcagcggctggagggatgccacacccctcacagggcagcccccaactacatcttccctgcttactctctgcctacctgcctgagccatgttcacctgcccacttgtcccctgctgcctgcccaaacaccccaccattggcctgtcaacccacccattggcctgtctgctgggtgctaacaaagctctcatcactccttcanttggtctgtctgtctctgtcttggtagttgccggtggacagcatggccgtgccagcctcccacactgaggccaggtctaccccccatcataccagccccmagraccaytamcccacggscagccaggggtccaragctagcccaggctggggatctcgactcagacaagatggtgacaatgccttgagtctgaggcatcctctgcctgctttcctgcctgccccacctgcctcatattgtgtgggcctttttttgtttgtttcattcattgttttttttttttnaattattttaaatgagatttttgttttttttaaatgcaatatctctgtatacagactggctgggcccaccccctgcgtgtggccctcccacagtattttgtgcaatgaagccctgctcccagcctttcagagacagggacacagcccctatttggaaccctgatcatcaccagaccctgggattggctatgggaaagcatgccacagccactcgccttcctacccccgcccgccatccccagttgcagggggatctggggactaccagagactctgggaaatggacaaggtggggggccccactctttctctcctgcagtcccgtagctggggcctccttccttctcagggtctccccagcccagtccccttgctcccatcccactcggtgctgttgggtaggggccctgccaggaactgaccagctcagcgaggagccataatgtgcatatgtgcacaagcagggttgggggaggggggtgtgaggggttgtgcccaggtgttgccccctatctcctggggagggtgaggcagggcagggacagtctccagggtcagtccctggatgggtggttacctccccttcctccaccctaagccctggggccctgaaatggggtgggagggcaggggtgggagccctcctagtgggtttggggggttgggttcctgaatgcaccataatcgctgtatgaaatattaaaaagtctaaagtgaaaaaaaaaaaaaaaa

SEQ ID NO: 73 - DNA, 510 bp, Homo sapiens
atgtacgagagcgcatccaaagaacctagtagagaaaggtattctaaccactgagaagcagaatttcctsctatttgacatgactactcatccagtgaccaatacaacagagaaacagcgactagtgaaaaaacttcaagatagtgtactagagcggtgggtaaatgaccctcagcgtatggacaagcgaacactagcactcctggtgctagcccactcctctgatgtgctagagaatgtcttctcctctctgacagatgacaagtatgatgtggcaatgaatcgagccaaggacttagtagaactggaccctgaagtggaagggacaaagccyagtgccacagaratgatctgggctgtgctggcagcctttyaataaatcytaaagccrgyrggtgggtttctycttttcccctgctggctggtgactgttcagagacmccwcactgagttttgtgtgatgasatgttttccatcattttttccttycttgaatcagacttgtgaatt

SEQ ID NO: 74 - DNA, 458 bp, Homo sapiens
  misc_feature (382): n equals a,t,g, or c
  misc_feature (388): n equals a,t,g, or c
  misc_feature (424): n equals a,t,g, or c
  misc_feature (448): n equals a,t,g, or c
gggtcgacccacgcgtccgctccacttaaaattcaacttctgcttggttcatctgattctttcaaggtcttaaatgttaaatgaaggggtaaaataggaaggtatttaagtaattagcaggcctcctgggtcttgataacttcagtgcttctgggagctgcccggttggccaccagtctctgtggaatccaggggcctcttcccaatatggatttgaccagcacttcaattagtgagtttccatkagcatcttagcattactctttaatacagacgccttattttccagggtttatgaaagtttaagtgacaaccatggattgcaggaacagactgttgagaagctgtttttccagtggaaaagttgggtccaggagatgangggagncttgaaatagatcctgggatggaaacataaagtggncagccagattcccatcatgggctnccccataaaa

SEQ ID NO: 75 - DNA, 377 bp, Homo sapiens
gtcctggaaacacatcaagctcagctcctgtgtccagctcgcttctctgctggactccttgattttttttttaatcattgtttgattttgagcagtaaccaggcttttttttccagatgttagtccacacctattcatccatggaccggcacgatggtgtcccgagccacagctcgcggctctcccagctgggctcggtgtcccaaggaccctactcgagcgccccgccgctgtcccacaccccgtcgtcggacttccagccgccctacttcccamccccctaccagccgctcccctamcamcagagccaggacccctactcccacgtcaamgamccctatccctgaacccactgcaccagccccagcaacatccct

SEQ ID NO: 76 - DNA, 2070 bp, Homo sapiens
  misc_feature (20): n equals a,t,g, or c
  misc_feature (39): n equals a,t,g, or c
  misc_feature (88): n equals a,t,g, or c
  misc_feature (2068): n equals a,t,g, or c
tcatgaatgggaatcctggncccaagaactccgcttgcngccagagggacctgcagctgaggacctatagcgttgtgcccatgacctncagtgtatcccagggcaccgccgtgtgtaatataaagattggctgacaaaaatgtcaggaaaacatgatgttggagcttacatgctaatgtataagggcgctaatcgtactgaaacagtcacgtcttttagaaaacgagaaagtaaagtgcctgctgatctcttaaagcgggccttcgtgaggatgagtacaagccctgaggctttcctggcgctccgctcccacttcgccagctctcacgctctgatatgcatcagccactggatcctcgggattggagacagacatctgaacaactttatggtggccatggagactggcggcgtgatcgggatcgactttgggcatgcgtttggatccgctacacagtttctgccagtccctgagttgatgccttttcggctaactcgccagtttatcaatctgatgttaccaatgaaagaaacgggccttatgtacagcatcatggtacacgcactccgggccttccgctcagaccctggcctgctcaccaacaccatggatgtgtttgtcaaggagccctcctttgattggaaaaattttgaacagaaaatgctgaaaaaaggagggtcatggattcaagaaataaatgttgctgaaaaaaattggtacccccgacagaaaatatgttacgctaagagaaagttagcaggtgccaatccagcagtcattacttgtgatgagctactcctgggtcatgagaaggcccctgccttcagagactatgtggctgtggcacgaggaagcaaagatcacaacattcgtgcccaagaaccagagagtgggctttcagaagagactcaagtgaagtgcctgatggaccaggcaacagaccccaacatccttggcagaacctgggaaggatgggagccctggatgtgaggtctgtgggagtctgcagatagaaagcattacattgtttaaagaatctactatactttggttggcagcattccatgagctgattttcctgaaacactaaagagaaatgtcttttgtgctacagtttcgtagcatgagtttaaatcaagattatgatgagtaaatgtgtatgggttaaatcaaagataaggttatagtaacatcaaagattaggtgaggtttatagaaagatagatatccaggcttaccaaagtattaagtcaagaatataatatgtgatcagctttcaaagcatttacaagtgctgcaagttagtgaaacagctgtctccgtaaatggaggaaatgtggggaagccttggaatgcccttctggttctggcacattggaaagcacactcagaaggcttcatcaccaagattttgggagagtaaagctaagtatagttgatgtaacattgtagaagcagcataggaacaataagaacaataggtaaagctataattatggcttatatttagaaatgactgcatttgatattttaggatatttttctaggttttttcctttcattttattctcttctagttttgacattttatgatagatttgctctctagaaggaaacgtctttatttaggagggcaaaaattttggtcatagcattcacttttgctattccaatctacaactggaagatacataaaagtgctttgcattgaatttgggataacttcaaaaatcccatggttgttgttagggatagtactaagcatttcagttccaggagaataaaagaaattcctatttgaaatgaattcctcatttggaggaaaaaaagcatgcattctagcacaacaagatgaaattatggaatacaaaagtggctccttcccatgtgcagtccctgtccccccccgccagtcctccacacccaaactgtttctgattggcttttagctttttgttgtttttttttttccttctaacacttgtatttggaggctcttctgtgattttgagaagtatactcttgagtgtttaataaagtttttttccaaaaaaaaaaaaaaaaaantt

SEQ ID NO: 77 - DNA, 997 bp, Homo sapiens
  misc_feature (619): n equals a,t,g, or c
ctcgccctcctgactcttcctgcaggtggctcaggaaggattcagcctggccacttggctaggactctgccagcacccatctgagactgacctcttccgggcctttggacactatgaccttgatgctgcccttcaggcaggaaacagggctggtgccttttttcacctgcatggccagcttccttccctggcagtggagagggcagccaacaggttctaatgtcagagccatcctttaccaggtgggcctgcttgtccctgtcttgcctgccacatcactctactttttggaaggccatggctgattaaagaagttcttgtagtttcccaagcaaagtggaatctagaaacagtgaaaaaagttcagataactttgaattgcattcaagaagtacacttctttcccattgtccgtggctcttggagtctccgtgatgccaggctagagtctgattatataataattcaaaatggtaactcccaaggtaatgctttcttccatttcatcaggttcttttatccccactgcaccccctccccttctcccttgcctatctggatggcttctcagaagctcggccctagtcctccctgccttggcgggggccagagcccactnactgctgaggcagcactgctctcgtcagctgtgttgcctttamccaagtgtcttcagagggttatgagttagagtagctggcctggggagagggtgcctccctgggtttgatctttagggtctgactttctgcagagaagatgttttacagatgtgtcaaagctgatgtaatgtggttgggggaggaaatccagacccaaagtgtttgtcagctgggtgtacaactgcctatgtgatcctctgtcttaaaatgatttctgtctgtgctgcgaaacaaagacaaggtgaggtgtttttcttttttgtaataatataaagctgtgtgtttctgattggatgattcactatgtgcattgttccycctaagtgcttttagta

SEQ ID NO: 78 - DNA, 1333 bp, Homo sapiens
  misc_feature (1254): n equals a,t,g, or c
  misc_feature (1297): n equals a,t,g, or c
gagaggagctgctgcgcgcccaggaagcgccggggcaggccgagccgccggccgccgccgaggtgcagggggctggcaacgaaaatgagcctcgcgaggccgacaagagccacccggagcagcgcragcttcggcctcggctctgtaccatgaagaagggccccagtggctatggcttcaacctgcacagcgacaagtccaagccaggccagttcatccggtcagtggacccagactccccggctgaggcttcagggctccgggcccaggatcgcattgtggaggtgaacggggtctgcatggaggggaagcagcatggggacgtggtgtccgccatcagggctggcggggacgagaccaagctgctggtggtggacagggaaactgacgagttcttcaagaaatgcagagtgatcccatctcaggagcacctgaatggtcccctgcctgtgcccttcaccaatggggagatacagaaggagaacagtcgtgaagccctggcagaggcagccttggagagccccaggccagccctggtgagatccgcctccagtgacaccagcgaggagctgaattcccaagacagccccccaaaacaggactccacagcgccctcgtctacctcctcctccgaccccatcctagacttcaacatctccctggccatggccaaagagagggcccaccagaaacgcagcagcaaacgggccccgcagatggactggagcaagaaaaacgaactcttcagcaacctctgagcgccctgctgccacccagtgactggcagggccgagccagcattccaccccacctttttccttctccccaattactcccctgaatcaatgtacaaatcagcacccacatcccctttcttgacaaatgatttttctagagaactatgttcttccctgactttagggaaggtgaatgtgttcccgtcctcccgcagtcagaaaggagactctgcctccctcctcctcactgagtgcctcatcctaccgggtgtccctttgccaccctgcctgggacatcgctggaacctgcaccatgccaggatcatgggaccaggcgagagggcaccctcccttcctcccccatgtgataaatgggtccagggctgatcaaagaactytgactgcagaactgccgytctyagtggacagggcatytgttatgacagacctktggcagacacgtcttgttttcattgatttttgttaagagtgcagtattgcagagtctagaggaatntatgtttccttgattaacatgatttcctggttgttacatccanggcaggcagtggctcagctttaaatttggtttccta

SEQ ID NO: 79 - DNA, 560 bp, Homo sapiens
  misc_feature (542): n equals a,t,g, or c
caatggggctgaggctgtgtccactgaggctaagatgactgcctttcctgattggccttggcttttccatacattgtgtgacccttgccctatgaccctttggctgaccttaccggaagccatgacgacagcagccttttgccattagacgcagggtgatggtgaggattccaagggttagacaaaactggttaatctgaactaggtgactgttaccttgcgtgttttgtggccaaaccaccaccaaaaacctcacactgtgatgtaagtacttagtgtaaaactagtaaacatttttgtaaaatgtagaaatgcatgtaatcagttaagttttatattttacaatgttctgtaaaataaaacttagcgaggtaaatcgaataaaggagcagtcactctctaacagattgtaggagaggtttagttggatttagtctatttgacttgcccttaatttaattttatggcaaatcacaaatgtgtcgaaggtttagcaatataatagcaaagtcctactccagtaaataaaagttggtatgttngtacttaactttcaaaag

SEQ ID NO: 80 - DNA, 3203 bp, Homo sapiens
  misc_feature (1116): n equals a,t,g, or c
  misc_feature (1443): n equals a,t,g, or c
  misc_feature (1942): n equals a,t,g, or c
  misc_feature (3188): n equals a,t,g, or c
  misc_feature (3201): n equals a,t,g, or c
cggtacgcgtgggtcgcgggcttcgggggtctgcgctcgcggctgcctggactcagcaggcccctggaccatgtcccgcgccctgcggccaccgctcccgcctctctgctttttccttttgttgctggcggctgccggtgctcgggccgggggatacgagacatgccccacagtgcagccgaacatgctgaacgtgcacctgctgcctcacacacatgatgacgtgggctggctcaaaaccgtggaccagtacttttatggaatcaagaatgacatccagcacgccggtgtgcagtacatcctggactcggtcatctctgccttgctggcagatcccacccgtcgcttcatttacgtggagattgccttcttctcccgttggtggcaccagcagacaaatgccacacaggaagtcgtgcgagaccttgtgcgccaggggcgcctggagttcgccaatggtggctgggtgatgaacgatgaggcagccacccactacggtgccatcgtggaccagatgacacttgggctgcgctttctggaggacacatttggcaatgatgggcgaccccgtgtggcctggcacattgaccccttcggccactctcgggagcaggcctcgctgtttgcgcaratgggcttcgacggcttcttctttgggcgccttgattatcaagataagtgggtacggatgcagaagctggagatggagcaggtgtggcgggccagcaccagcctgaagcccccgaccgcggacctcttcactggtgtgcttcccaatggttacaacccgccaaggaatctgtgctgggatgtgctgtgtgtcgatcagccgctggtggaggaccctcgcagccccgagtacaacgccaaggagctggtcgattacttcctaaatgtggccactgcccagggccggtattaccgcaccaaccacactgtgatgaccatgggctcggacttccaatatgagaatgccaacatgtggttcaagaaccttgacaagctcatccrgctggtaaatgcgcaaggcaaaaggaagcagtgtccatgttctctactccacccccgcttgttacctctgggagctgaacaaggccaacctcacctggtcagtgnaacatgacgacttcttcccttacgcggatggcccccaccagttctggaccggttacttttccagtcggccggccctcaaacgctacgagcgcctcagctacaacttcctgcaggtgtgcaaccagctggaggcgctggtgggcctggcggccaacgtgggaccctatggctccggagacagtgcacccctcaatgaggcgatggctgtgctccagcatcacgacgccgtcagcggcacctcccgccagcacgtggccaacgactacgcgcgccastttgcggcaggctgggggccttgcgaggttcttctgagcaacgcctggcgcngctcagaggcttcaaagatcacttcaccttttgccaacagctaaacatcagcatctgcccgctcagccagacggcggcgcgcttccaggtcatcgtttataatcccctggggcggaaggtgaattggatggtacggctgccggtcagcgaaggcgttttcgttgtgaaggaccccaatggcaggacagtgcccagcgatgtggtaatatttcccagctcagacagccaggcgcaccctccggagctgctgttctcagcctcactgcccgccctgggcttcagcacctattcagtagcccaggtgcctcgctggaagccccaggcccgcgcaccacagcccatccccagaagatcctggtcccctgctttaaccatcgaaaatgagcacatccgggcaacgtttgatcctgacacagggctgttgatggagattatgaacatgaatcagcaactcctgctgcctgttcgccagaccttcttctggtacaacgccagtatnaggtgacaacgaaagtgaccaggcctcaggtgcctacatcttcagacccaaccaacagaaaccgctgcctgtgagccgctgggctcagatccacctggtgaagacacccttggtgcaggaggtgcaccagaacttctcagcttggtgttcccaggtggttcgcctgtacccaggacagcggcacctggagctagagtggtcggtggggccgatacctgtgggcgacacctgggggaaggaggtcatcagccgttttgacacaccgctggagacaaagggacgcttctacacagacagcaatggccgggagatcctggagaggaggcgggattatcgacccacctggaaactgaaccagacggagcccgtggcaggaaactactatccagtcaacacccggatttacatcacggatggaaacatgcagctgactgtgctgactgaccgctcccaggggggcagcagcctgagagatggctcgctggagctcatggtgcaccgaagctgctgaaggacgatggacgcggagtatcggagccactaatggagaacgggtcgggggcgtgggtgcgagggcgccacctggtgctgctggacacagcccaggctgcagccgccggacaccggctcctggcggagcaggaggtcctggcccctcaggtggtgctggccccgggtggcggcgccgcctacaatctcggggctcctccgcgcacgcagttctcagggctgcgcagggacctgccgccctcggtgcacctgctcacgctggccagctggggccccgaaatggtgctgctgcgcttggagcaccagtttgccgtaggagaggattccggacgtaacctgagcgcccccgttaccttgaacttgagggacctgttctccaccttcaccatcacccgcctgcaggagaccacgctggtggccaaccagctccgcgaggcagcctccaggctcaagtggacaacaaacacaggccccacaccccaccaaactccgtaccagctggacccggccaacatcacgctggaacccatggaaatccgcactttcctggcctcagttcaatggaaggaggtggatggttaggtctgctgggatgggccctccaagcccaagcctcctgctccgggggcagaccagactctgactctcctcttgggctgctgccattaaaacgctactactaagaaaaaaaaaaaaaaaaaaaaaaaaaaaaaaaaaaaaaaaaaaaaaaatttanaaaaaaaaaaaanaa

SEQ ID NO: 81 - DNA, 1710 bp, Homo sapiens
  misc_feature (1424): n equals a,t,g, or c
aagagccgaacggataagagaagaggagggcgcgkatggcgtcggggcgccccgaggagctgtgggaggccgtggtgggggccgctgagcgcttccgggcccggactggcacggagctggtgctgctgaccgcggccccgccgcaccaccccgcccgggcccctgtgcctatgctgcccatggtcgaggagccctggcggaggcagcgcgccgttgcctccacgacatcgcactggcccacagggctgccactgctgctcggcctcctgcgcccccaccagcaccacagccacccagtcccacacccagcccaccccggcctaccctggccagagaggacaacgaggaggacgaggatgagcccacagagacagagacctccggggagcagctgggcattagtgataatggagggctctttgtgatggatgaggacgccaccctccaggaccttccccccttctgtgagtcagaccccgagagtacagatgatggcagcctgagcgaggagacccccgccggcccccccacctgctcagtgcccccagcctcagccctacccacacagcagtacgccaagtccctgcctgtgtctgtgcccgtytggggcttcaaggagaagaggacagaggcgcggtcatcagatgaggagaatgggccgccctcttcgcccgacctggaccgcatcgcggcgagcatgcgcgcgctggtgctgcgagaggccgaggacacccaggtcttcggggacctgccacggccgcggcttaacaccagcgacttccagaagctgaagcggaaatattgaagtccagggagggagcgccccgggccgcgtccgccccgtcccacactacgcccccgccccactcccggggcctgctaatctgaggccgatccgggaccggcctccttgcgtctcccattcccaagattgtcccgcctctgccaatccccgccgtccttccagcccacgacctgccgcgccgaggagcggcwtctgtcccgtttcccgattgggtctgtcgtctctctccgcctagcgacagattccttctattaagggattggctcgctgagttctaagctctaaatgggtcaactcctttgttttccgcctagcgacaagggatttgctcgcacggcattggctccatcccctagtcgctggacagctctttttttgattggctcaaatcctgtaaagggcttgaccagtctctacatagtcaccgtccgcttttcctgagttctccctcccaattggctccagcttcctgggggcgtggccaagccctcctcttcccagaattggcccggggccttcaatttacgttctttacactacggggactggggtcgtctttgcccacgtcccgacaacttgttccctgaccccctcagggatggccccaaactgtccctgnctctggcaccccctttcattggttccatccatccccacaacagcctgccaatcgaagcccgtccctgcatccaggatggtaccagctcccgcccctcgccccccacctccacaggtgccttaaagggccctcgtcacccaaggtgggggcaggggccctcactctccggccctggtgtgggggagagagtgaggggttgggggatcggcagttgggaggggcgctctgagattaaagagttttacctctgagataaaaaaaaaaaaaaaaaaaaaaaaaaaaaaaa

SEQ ID NO: 82 - DNA, 1379 bp, Homo sapiens
  misc_feature (280): n equals a,t,g, or c
  misc_feature (1365): n equals a,t,g, or c
  misc_feature (1378): n equals a,t,g, or c
aattcggcagagctgagccccgggctgtgcagtccgacgccgactgaggcacgagcgggtgacgctgggcctgcagcgcggagcagaaagcagaacccgcagagtcctccctgctgctgtgtggacgacacgtgggcacaggcagaagtgggccctgtgaccagctgcactggtttcgtggaaggaagctccaggactggcgggatgggctcagcctgtatcaaagtcaccaaatactttctcttcctcttcaacttgatcttctttatcctgggcgcantgatcctgggcttcggggtgtggatcctggccgacaagagcagtttcatctctgtcctgcaaacctcctccagctcgcttaggatgggggcctatgtcttcatcggcgtgggggcagtcactatgctcatgggcttcctgggctgcatcggcgccgtcaacgargtccgctgcctgctggggctgtamtttgctttcctgctcctgatcctcattgcccargtgacggccggggccctcttctacttcaacatgggcaaggtaagcccctctctccctccctcttcactgggctggaccaaccatgggggtgattgactgagtgtgggggatggacaaggaacccccccagttgtcacagacagatccagtaggtgtcagggacggcctcctggacactattccttgtgaatcaaatgggggagcgttagaagagaaggcggcaggtgtrggcagtccccgctgggcctggwtcttagcctgacccccctgctttctagctgtgtggccttgggcaagctgcttgcctctatgtgcctgttccaccatctgtgaaaatggaaacaataagaaaactgaactctcagagtggttgcaaagattattcgagattatctgagtgaaacacatagcgcatggcaccataagtactcaataaatgttattcttgttattattaagrtactttagcaactattaaatccatgccactcacccacaaatgaggtttagaaggagaccgttaataaaaacatcagtcttgtgtccgaggggagatgttcagctttcagaaacagaaaatcagacttacagcggcttaaagttgaaggacatctgtggttgacttgaccggaagtctggtttggaagctcagaggccctggttctggctgttgagcatcctcgctgggatggctttcctgcattatgacacttacctcgtggttccaagatggctgccacagcaccaggcacgatgtctgtgccgctgtggcctgaagatggggaagtgggcagtgccagacatggccatcccttttatccagaaaaggcgcagtggctcatgactgtaatccccaatacttanggaagcagaagtng

SEQ ID NO: 83 - DNA, 678 bp, Homo sapiens
  misc_feature (602): n equals a,t,g, or c
  misc_feature (626): n equals a,t,g, or c
  misc_feature (648): n equals a,t,g, or c
gcaagagcggaagaaagcggctggtaccccggaagcagtcgctgcaacttccgggaggtgcttgtgtgcctggtgcgggagctacggggcccagggattgtgtttaaagtagtgcttctaccaacatgtcccgtggttccagcgccggttttgaccgccacattaccattttttcacccgagggtcggctctaccaagtagaatatgcttttaaggctattaaccagggtggccttacatcagtagctgtcagagggaaagactgtgcagtaattgtcacacagaagaaagtacctgacaaattattggattccagcacagtgactcacttattcaagataactgaaaacattggttgtgtgatgaccggaatgacagctgacagcagatcccaggtacagagggcacgctatgaggcagctaactggaaatacaagtatggctatgagattcctgtggacatgctgtgtaaaagaattgccgatatttctcaggtctacacacagaatgctgaaatgaggcctcttggttgttgtatgattttaattggtatagatgaagagcaaggccctcaggtatataagtgtgatcctgcaggttantactgtggggtttaaagccactgnagcgggagttaaacaaactggngtcaaccagcttccttgaaaaaaaagtgga

SEQ ID NO: 84 - DNA, 2803 bp, Homo sapiens
  misc_feature (10): n equals a,t,g, or c
  misc_feature (50): n equals a,t,g, or c
  misc_feature (517): n equals a,t,g, or c
  misc_feature (572): n equals a,t,g, or c
  misc_feature (1926): n equals a,t,g, or c
caacatgagnaatccttctcctccctctggctggcttggaaatscaaaanctcytcgcaacgtcccgcaaraatctggttgctctgccggatggcatctcggagctcttgattctcctccaggcarcgctggagggtctcaggagcgccctgttctgaaggcaggtgcagcatggctggcttccccagaggagactcttcgcccagtacgtcctgatctgctgccgggccaccactgggctgcaccatctcacacagttggctcttccagaggtgcctattcatccaacagggcaagggctgtcagcagagtccgtcagacgtgagaagggtgggagcggcggactgtgaacgctggtagggccccggcgctccgagaaagtcccagtttcgcggtcgcccttccctaccacgcttccggcttccggtgtcatagctgtgggatccggaagtaaaaacacaagccccgcscccrrgaactcgggaagccggcgakaagtgtgaggccgcggtagggncgcatcccgctccggagagaagtctgagtccgccagctctgcaggcccgcggaantcgacagcgtcatggcagagcaggtggccctgagccggacccaggtgtgcgggatcctgcgggaagagcttttccagggcgatgccttccatcagtcggatacacacatattcatcatcatgggtgcatcgggtgacctggccaagaagaagatctaccccaccatctggtggctgttccgggatggccttctgcccgaaaacaccttcatcgtgggctatgcccgttcccgcctcacagtggctgacatccgcaaacagagtgagcccttcttcaaggccaccccagaggagaagctcaagctggaggacttctttgcccgcaactcctatgtggctggccagtacgatgatgcagcctcctaccagcgcctcaacagccacatgaatgccctccacctggggtcacaggccaaccgcctcttctacctggccttgcccccgaccgtctacgaggccgtcaccaagaacattcacgagtcctgcatgagccagataggctggaaccgcatcatcgtggagaagcccttcgggagggacctgcagagctctgaccggctgtccaaccacatctcctccctgttccgtgaggaccagatctaccgcatcgaccactacctgggcaaggagatggtgcagaacctcatggtgctgagatttgccaacaggatcttcggccccatctggaaccgggacaacatcgcctgcgttatcctcaccttcaaggagccctttggcactgagggtcgcgggggctatttcgatgaatttgggatcatccgggacgtgatgcagaaccacctactgcagatgctgtgtctggtggccatggagaagcccgcctccaccaactcagatgacgtccgtgatgagaaggtcaaggtgttgaaatgcatctcagaggtgcaggccaacaatgtggtcctgggccagtacgtggggaaccccgatggagagggcgaggccaccaaagggtacctggacgaccccacggtgccccgcgggtccaccaccgccacttttgcagccgtcgtcctctatgtggagaatgagargtgggatggggtgcccttcatcctgcgctgcggcaaggccctgaacgagcgcaaggccgaggtgaggctgcagttccatgatgtggccggcgacatcttccaccagcagtgcaagcgcaacgagctggtgatccgcgtgcagcccaacgaggccgtgtacaccaagatgatgaccaagaagccgggcatgttcttcaaccccgaggagtcggagctggacctgacctacggcaacagatacaagaacgtgaagctccctgacgcctacgagcgcctcatcctggacgtcttctgcggganccagatgcacttcgtgcgcaggacgagctccgtgaggcctggcgtattttcaccccactgctgcaccagattgagctggagaagcccaagcccatcccctatatttatggcagccgaggccccacggaggcagacgagctgatgaagagagtgggtttccagtatgagggcacctacaagtgggtgaacccccacaagctctgagccctgggcacccacctccacccccgccacggccaccctccttcccgccgcccgaccccgagtcgggaggactccgggaccattgacctcagctgcacattcctggccccgggctctggccaccctggcccgcccctcgctgctgctactacccgagcccagctacattcctcagctgccaagcactcgagaccatcctggcccctccagaccctgcctgagcccaggagctgagtcacctcctccactcactccagcccaacagaaggaaggaggagggcgcccattcgtctgtcccagagcttattggccactgggtctcactcctgagtggggccagggtgggagggagggacaagggggaggaaaggggcgagcacccacgtgagagaatctgcctgtggccttgcccgccagcctcagtgccacttgacattccttgtcaccagcaacatctcgagccccctggatgtcccctgtcccaccaactctgcactccatggccaccccgtgccacccgtaggcagcctctctgctataagaaaagcagacgcagcagctgggacccctcccaacctcaatgccctgccattaaatccgcaaacagccaaaaaaaaaaaaaaaaaaaaaaaaaaaaaaaaaaaaaaaaaaaaaaaaaaaaaaaaaaaaaaag

SEQ ID NO: 85 - DNA, 1278 bp, Homo sapiens
tcgacccacgcgtccgcaagaagctttttgagggcctgaagttcttcctgaaccgagagtgccccgtgaggccctggccttcatcatcaggagttttggtggggaagtgtcctgggacaaatctttgtgcattggggccacctatgacgtcacagactcccgcatcacccatcagattgtcgaccggcctgggcagcagacctcagtcattggcaggtgctacgtgcagccccagtrggtgtttgactcagtgaacgccaggctccttctccccgtggcagagtacttctctggggtgcagctgcccccacacctttcaccctttgtgaccgagaaggaaggagattacgttccacctgagaagctgaagctgctggctctgcagcggggagaggacccaggaaacctgaatgagtcagaagaggaggaggaagaggacgacaacaacgaaggtgatggtgatgaagagggagaaaatgaggaggaggaggaagatgcagaggctggttcagaaaaggaggaagaggcccggctggcagccctggaagagcagaggatggaggggaagaagcccagggtgatggcaggcaccttgaagctggaggataagcagcggctggcccaggaggaggagagtgaggccaagcgcctggccattatgatgatgaagaagcgggagaagtacctgtaccagaagatcatgtttggcaagaggcgaaaaatccgagaggccaacaagctggcggagaagcggaaagcccacgatgaggcggtgaggtctgagaagaaggccaagaaggcaaggccggagtgagtgcctgcggcccctcacagggctgaggccagcccctagcagctggatgtggcagaggcaggccagaggacctaagtgtgatggaccagagtcacttctcctcctcctttctccagccagccctgacccctcatgctctctggctgggccagtgggcagccctcgcttcccttggatggagctgccctgctggtgcctggtcagagaagaggcctctgtgcccagcctgattctctgctcccaggagccagtgacatgaggtgcagaggcccacccagccccctacctactgcccccattcatcctggctttccacagccccctcccacacagttggacccgtgattctcagggtgctgtgatggggtgagggtagggggagcatttgttattaaatgactggacttttgtgccaaaaaaaaaaaaaaaaaaaaaaaaaaaaaaaaaaaaaacccacgcgtccg

SEQ ID NO: 86 - DNA, 2585 bp, Homo sapiens
  misc_feature (2573): n equals a,t,g, or c
tcgacccacgcgtccgcgggctatttgttggagcccaagcctggtggtgggccttcaagaaccccggagtgtcccctttggctcgattcccaggaaactcctcctcaacccctttggcatcagcattacaagccaaagcctcaatccagggccctttcgtactcctaaagcagggataaggacctatcacttccgctccaccttggccgagttccaggttataatgggcaggaagagaggaaatgtggaaaagggctggttggcaaagctgggaccagatggtgcagctttcctgcagattcccgcagaagagatccctgcctacatgtctgtgcatcgactcctgaggaagctgctaagtcgatatcggcttccagtagcaacccgagagaaccctgttatcaatgactgctgcagaggtgctatgctttccctggccacaggctggcccactctggaagcgacctctctctgttagtcccagaaattgaagatatgtacagcagcccctatctgcgcccctcagaatctcctatcaccgtcgaggtcaactgcaccaatccaggcaccagatattgctggatgagtactgggctctacatacctggaaggcaaattatagaagtctcactgcctgaagctgctgcctctgccgacctgaagatacagattggctgccacacagatgacctgaccagggccagcaagcttttccgaggcccactcgtaattaaccggtgctgcttggacaaacccacaaaatcgatcacgtgcctctggggtggactcctctatataattgtgcctcagaacagcaaactgggttctgtgcctgtcaccgtgaagggggctgtgcatgctccatactacaagctgggggagaccaccctggaggagtggaagaggcgtatccaggagaatccagggccctggggagagctggccacggacaacatcattctgaccgtgccgaccgcaaatcttcgtactctggagaaccctgagccgctgctccgcctctgggatgaggtgatgcaggctgtggcgcgactgggagctgagcccttccctttgcgcctgcctcagaggattgttgccgacgtgcagatctcagtgggctggatgcatgcagggtaccccatcatgtgccatctggagtcagtgcaggarctcatcaacgagaagctcatcagaaccaaggggctgtggggccccgtccatgagctgggccgcaaccagcagcggcaggagtgggagttcccaccacacaccaccgaggccamctgcaacctgtggtgtgtgtatgtgcatgagacggtcttgggcattcctcgaagccgtgccaatattgctctgtggcccccagttcgggagaagagagtcagaatctacctgagcaagggtcccaatgtgaaaaactggaatgcatggmccgcactggaaacgtatttacagctccaggaagcctttggttgggagccattcatccgtctcttcaccgagtacaggaaccagaccaacttgcccacagaaaatgttgacaaaatgaatctgtgggtcaagatgttctcccaccaagtgcagaagaacctggctccgttctttgaggcctgggctggcccatccagaaggaagtggctaccagcctggcctatctgcctgaatggaaggaaaatattatgaaattgtacctcctcacacagatgccccactgaaattgaagtcaagaaatgcaaaaaggaactgagcacatctcagcaaagaaaactgaagggatttggttataagtggagaggatctcagcatatttctggaagatagaaagtggatgaagcatgataatgaaagagtgaagaacctttcagataaaatgtaagctgatctgaacaacataaccccaaagagacttgcgcacctgaaaagcttgtctactgaagaattactccagttgtaagattgagccctctcctactctcccccaactcttatgcacagaacacaggcagtctccactattgataccagttaaaaatttcttgttattgttgctgttgttgtttgtataaaggaattgaacaggctgcttgcagagagataagagttggtgctccagaaaaaaatttctcttctagtggaaataagtgcccctacccccagccggtcagctaattctctactgacagctgagacctcctactcaagtgcctgttgccttcaggtatagaagaggtttcctgaagaaacagacctaactgtacaacagcagaggaaacccatgccaactgttatacaagttaacagttatgttgattcttaaatggggaatggtgagttagaaattcccagacatgggcgatggggagggaagaggrataaggaaaagtcacgaggtaggawttagggggccttgaaaatatgacaaactctgaggggaaacaaagrcmatktgggaaagawtaacttaattttaattccatctccagagagatttgaggtgtatttaagatgaaaaacaggatactacaaagaaacgggaaaactcaggggttcaagaccagcctaggcaagatggnaaaaaacccccc

SEQ ID NO: 87 - DNA, 385 bp, Homo sapiens
  misc_feature (385): n equals a,t,g, or c
gggtcgacccacgcgtccgcatgaatttgtcacaatcttatcaataatcattactctgttttttatatttcaactaaaagtatcaaaatatagctttccagaaaaccccgaaccaaagtcactgactacatcaaagtctactacaccttgagaaaacaaatgaacgaaaatctattttcctcattcattaccccaacaataataggactccctatcgtaattattatcactatgtttccaagcattatattcccatcacctacccgactraatcaataatcgactscatctccattccaacaatgattagtgcactgaacatscaaaacaaatrttgatccatgccacaaccaaaaaggacaaactggagcccggatattgatan

SEQ ID NO: 88 - DNA, 2500 bp, Homo sapiens
  misc_feature (429): n equals a,t,g, or c
  misc_feature (1088): n equals a,t,g, or c
  misc_feature (2480): n equals a,t,g, or c
  misc_feature (2482): n equals a,t,g, or c
  misc_feature (2491): n equals a,t,g, or c
  misc_feature (2497): n equals a,t,g, or c
tcgacccacgcgtccgcccacgcgtccgtctccaccgctgctgccgccgccctggccgccgccgcagtgaaagctaagcacttggctgctgttgaggaaaggaagatcaaatctttggtggccctgctggtggagacccagatgaaaaagttggagatcaaacttcggcactttgaggagctggagactatcatggaccgggagcragaagcactggagtatcagaggcagcagctcctggccgacagacaagccttccacatggagcagctgaagtatgcggagatgagggctcggcagcagcacttccaacagatgcaccaacagcagcagcagccaccaccagccctgcccccaggctcccagcctatccccccaacaggggctgctgggccacccgcaktccatggcttggctgtggctccagcntctgtagtccctgctcctgctggcagtggggcccctccaggaagtttgggcccttctgaacagattgggcaggcagggtcaactgcagggccacagcagcagcaaccagctggagccccccagcctggggcagtcccaccaggggttcccccccctggaccccatggcccctcaccgttccccaaccaacaaactcctccctcaatgatgccaggggcagtgccaggcagcgggcacccaggcgtggcgggtaatgctcctttgggtttgccttttggcatgccgcctcctcctcctcctcctgctccatccatcatcccatttggtagtctagctgactccatcagtattaacctccccgctcctcctaacctgcatgggcatcaccaccatctcccgttcgccccgggcactctccccccacctaacctgcctgtgtccatggcgaaccctctacatcctaacctgccggcgaccaccaccatgccatcttccttgcctctcgggccggggctcggatccgccgcagcccaaagccctgccattgtggcagctgttcagggcaacctcctgcccagtgccagcccactgccagacccaggcacccccctgcctccagaccccacagccccgagccccaggcacggtcacccctgtgnccacctccacagtgaggagccagccagacatctctccccctcaccccctgtggacatcacggttccaggaacagcccttcccccaccactgggaccctccccagcctggagagttcatcactacgtaaggaaagctccttccgcccctccaaagccctcaccatgcctaacagaggcatgcatttttatatcagattattcaaggacttctgtttaaaagatgtttataatgtctgggagagaggataggatgggaatgctgccctaaaggaagggctggtgaaaggtgtttatacaaggttctattaaccacttctaagggtacacctccctccaaactactgcattttctatggattaaaaaaaaaaaaaaaagtagattttaaaaagccacattggagctcccttctacccactaaaaaataaccaatttttacattttttgagggggagtgagttttaggaaaggggaattaagattccagggagagctctggggatagaacagggcgcagattccatctctccccaagcccctttttagtgactaagtcaaggccccaactcccctcccccaccctacgctgagcttattcgagttcattcgtactaataatccctcctgcggcttcctcattgttgctgttttaggccaccccagctcagccaatgattcctttccctctgaatgtcagttttgtttttaaaagtcacttgcttagttgatgtcagcgtatgtgtatttggtggggaaaacctaatttcggggatttctgtggtaggtaataggagaagaaagggcactgggggctgttctccttccttccctgggctgtatccatggactcctggaaggcacagagaagggagctataagaggatgtgaagttttaaaacctgaaattgttttttaaagcacttaagcacctccatattatgacttggtgggtcaccccttagcttcctccctctcccaccaagactatgagaacttcagctgatagctgggggctccccagatgaggatgcagggatttgggagcagtggaagagggtgcccaaccttgggttggaccaacccttggctcgcagctcaactctgcttcccgcattcctgctccacgtgtcccagcttctcccctgtgacgggaaggcaggtgtgactccaggctctgcactggttcttcttggttcctcccaccaggccctttgttcctcatgtccccatgtttctctccctctgcgtcttagcacctttcttctgttcaaagttttctgtaaattttctctttttttctttctttcttttttttttttttataaattaatttgctttcagttccaaaaaaaaaaaaaaaaaaaaaaaaaaaaaaaaaaaaaaaaaaaaaaaantngaggggggncccggnacc

SEQ ID NO: 89 - DNA, 1409 bp, Homo sapiens
  misc_feature (841): n equals a,t,g, or c
aggagtatgtatttcccgccaagaagaagctgcaggaataccgggtcttaattaccaccctcatcactgccggcagttggtctcggcccagtttcccattgatcacttcacacacatcttcatcgatgaggctggccactgcatggagcctgagaagtctggtagctatagcagggctgatggaagtaaaggaaacaggtgatccaggagggcagctggtgctggcaggagaccctcggcagctggggcctgtgctgcgttccccactgacccagaagcatggactgggatactcactgctggarcggctgctcacctacaactccctgtacaagaagggccctgatggctatgacccccagttcataaccaagctgctccgcaactacaggtctcatcccaccatcctggacattcctaaccagctctattatgaaggggagctgcaggcctgtgctgatgtcgtggatcgagaacgcttctgccgctgggcggscctacctcgacagggctttcccatcatctttcacggcgtaatgggcaaagatgagcgtgaaggcaacagcccatccttcttcaaccctgaagaggctgccacagtgacttcctacctgaagctgctcctggccccctcctccaagaagggcaaagctcgcctgagccctcgaagtgtgggcgtcatctccccgtaccggaaacaggtggagaaaatccgttactgcatcaccaaacttgacagggagcttcgaggactggatgacatcaaggacttgaaggtgggttcagtagaagaattccaaggccaagaacgaagcgtcatcctcatctccaccgtgcgaanagccagagctttgtgcagctggatctggactttaatctgggtttccttaagaaccccaagaggttcaatgtagctgtgacccgggccaaggcctgctcatcatcgtggggaacccccttctcctgggccatgaccctgactggaaagtattcctggagttctgtaaagaaaacggagggtataccgggtgtcccttccctgccaaactggacctgcaacagggacagaatttactgcaaggtctgagcaagctcagcccctctacctcagggccccacagycatgactacctcccccaggagcgggagggtgaagggggcctgtctctgcaagtggagccagagtggaggaatgagctctgaagacacagcacccagccttctcgcaccagccaagccttaactgcctgcctgaccctgaaccagaacccagctgaactgcccctccaagggacaggaaggctgggggagggagtttacaacccaagccattycaccckcctccctgctggggagaatgacacatcaagctgctaacaattgggggaaggggaaggaagaaaactctg

SEQ ID NO: 90 - DNA, 1336 bp, Homo sapiens
  misc_feature (49): n equals a,t,g, or c
  misc_feature (1284): n equals a,t,g, or c
  misc_feature (1317): n equals a,t,g, or c
  misc_feature (1333): n equals a,t,g, or c
agaacagtacctccctctcactgaggaagaactagaaaaagaagcaaanaaagttgaaggatttgatctggttcagaagccaagttattatgttagactgggatccctgtctaccaagcttcactcccgtgcctaccagcaggctctcagcagggttaaagaagctaagcaaaaaagccaacagaccatttctcagctccattctactgttcacctgattgaatttgccaggaagaatgtgtatagtgccaatcagaaaattcaggatgctcaggataagctctacctctcatgggtagagtggaaaaggagcattggatatgatgatactgatgagtcccactgtgctgagcacattgagtcacgtactcttgcaattgcccgcaacctgactcagcagctccagaccacgtgccacaccctcctgtccaacatccaaggtgtaccacagaacatccaagatcaagccaagcacatgggggtgatggcaggcgacatctactcagtgttccgcaatgctgcctcctttaaagaagtgtctgacagcctcctcacttctagcaaggggcagctgcagaaaatgaaggaatctttagatgacgtgatggattatcttgttaacaacacgcccctcaactggctggtaggtcccttttatcctcagctgactgagtctcagaatgctcaggaccaaggtgcagagatggacaagagcagccaggagacccagcgatctgagcataaaactcattaaacctgcccctatcactagtgcatgctgtggccagacagatgacaccttttgttatgttgaaattaacttgctaggcaaccctaaattgggaagcaagtagctagtataaaggccctcaattgtagttgtttccagctgaattaagagctttaaagtttctggcattagcagatgatttctgttcacctggtaagaaaagaatgataggcttgtcagagcctatagccagaactcagaaaaaattcaaatgcacttatgttctcattctatggccattgtgttgcctctgttactgtttgtattgaataaaaacatcttcatgtgggctggggtagaaactggtgtctgctctggtgtgatctgaaaaggcgtcttcactgctttatctcatgatgcttgcttgtaaaacttgattttagtttttcatttctcaaataggaatactacctttgaattcaataaaattcactgcaggatagaccagttaaaaaaaaaaaaaaaaaaaaaaaaggggggccgcccaagggrtncccccgaggggggccccagctttacgcgtggcntgcgacgtccaaagcnccc

SEQ ID NO: 91 - DNA, 787 bp, Homo sapiens
  misc_feature (677): n equals a,t,g, or c
  misc_feature (725): n equals a,t,g, or c
  misc_feature (742): n equals a,t,g, or c
ggcacgagctgtggggctgtgggcctgttacccccaggcgcacagctccctccggctgggcccaggctccactcagtgacacggctcaagtctacatggagctgcagggcctggtggacccgcagatccagctacctctgttagccgcccgaagtacaagttgcagaagcagcttgatagcctcacagccaggaccccatcagaaggggaggcagggactcagaggcaacaaaagctttcttccctccagctggaattgtcaaaactggacaaggcagcctctcacctccrgcagctgatggatgagcctccagccccagggagcccggagctctaactcatcatccccatcagttttcctccctctcagacctgtctttgaggacaaacagatttgtcagctgtcagggtgcagtgggacgtcagagactatgtggtccatcgccttcattgtgtaaatgaggacacagactggcttggtcgcagtgactgtggtgtccttgagatgctcacattactgcccggcctgcctcccacctggaagtctgggaatgaggagattgagataaacttttgaaatcccaaacatgtctgtttatggctctttggtcccctttgctcccagtggtgacttttgtgcttctgagttgtcccctgagagcttggtctgggaaaanaggaaggaaggggtcctcactggaggaagaggaacctttctaagtcangggtaaggggaatgggnacagttggttcccggttctaacctccttttctggactgacaagtg

SEQ ID NO: 92 - DNA, 1657 bp, Homo sapiens
cgcgtccgcccacgcgtccgcccacgcgtccggctactcagaggaaggggcggttggtgcggcctccattgttcgtgttttaaggcgccatgaggggtgacagaggccgtggtcgtggtgggcgctttggttccagaggaggcccaggaggagggttcaggccctttgtaccacatatcccatttgacttctatttgtgtgaaatggcctttccccgggtcaagccagcacctgatgaaacttccttcagtgaggccttgctgaagaggaatcaggacctggctcccaattctgctgaacaggcatctatcctttctctggtgacaaaaataaacaatgtgattgataatctgattgtggctccagggacatttgaagtgcaaattgaagaagttcgacaggtgggatcctataaaaaggggacaatgactacaggacacaatgtggctgacctggtggtgatactcaagattctgccaacgttggaagctgttgctgccctggggaacaaagtcgtggaaagcctaagagcacaggatccttctgaagttttaaccatgctgaccaacgaaactggctttgaaatcagttcttctgatgctacagtgaagattctcattacaacagtgccacccaatcttcgaaaactggatccagaactccatttggatatcaaagtattgcagagtgccttagcagccatccgacatgcccgctggttcgaggaaaatgcttctcagtccacagttaaagttctcatcagactactgaaggacttgaggattcgttttcctggctttgagcccctcacaccctggatccttgacctactaggccattatgctgtgatgaacaaccccaccagacagcctttggccctaaacgttgcatacaggcgctgcttgcagattctggctgcaggactgttcctgccaggttcagtgggtatcactgacccctgtgagagtggcaactttagagtacacacagtcatgaccctagaacagcaggacatggtctgctatacagctcagactctcgtccgaatcctctcacatggtggctttaggaagatccttggccaggagggtgatgccagctatcttgcttctgaaatatctacctgggatggagtgatagtaacaccttcagaaaaggcttatgagaagccaccagagaagaaggaaggagaggaagaagaggagaatacagaagaaccacctcaaggagaggaagaagaaagcatggaaactcaggagtgacattcccttcactccttttcctacccaagggggaagactggagcctaagctgcctgctactgggctttacatggtgacagacatttccgtgggatagggaagatagcaggaagaaaagtaaactccatagaagtgtcattccactgggttttgatattggcttagctgccagtctcccatttgtgacctatgccatccatctataatggaggataccaacatttcttcctaatattctataatctccaactcctgaaaacccctctctcaactaatactttgctgttgaaatgttgtgaaatgttaagtgtctggaaatttttttttctaagaaaaactattaaagtacttcctagtaggaaaaaaaaaaaaaaaaaaaaacycgggggttttct

SEQ ID NO: 93 - DNA, 485 bp, Homo sapiens
  misc_feature (478): n equals a,t,g, or c
  misc_feature (485): n equals a,t,g, or c
aattcggcacgaggggttctgcactaacagcctccaagccccctggcacttcttttgccctgagagtgtcccaggggattcagagtctccagaaagatatggctrggccaactctgttgcctacctrgcctgacccagtcggagcctgacatggtggagggaaagggagacaagtggggctgcactcggtccagaggccagctaggagggaaaccgcagcttcctggggcttgtgtgtgaagattcctgacttaggggtggcttttgtttacaagatgcaagaggggaaacctgtccccgactcatcgagacaacatgcccagttatcagggagtcctgtgtcacaaggtctgtctctgccattgtaagcaagtgccttgggcgagctggcctctgccccacagtctcatctgtacaccgacagggttgatgcctccctcacagggttgagaacaagagccakttggccaattaaaanaaaaaan

SEQ ID NO: 94 - DNA, 764 bp, Homo sapiens
  misc_feature (202): n equals a,t,g, or c
  misc_feature (565): n equals a,t,g, or c
ccccagccagtctgccctctgccatggggggcggagaggacgaggaggaggccaccgactatggagggacctcagtgccgactgccggggaggccgtgcgggggctagaaacagctctgcgrtggctggagaaccaggaccccagagaggtggggccactgaggctggtgcagttgcgctcactcatcagcatggcccggangctggggggcatcgggcataccccagcaggcccctatgacggtgtgtgaccaggccascccagtgacctttctcctgctgcacttggagggaggggacatacacacagtctcccatctctcctcccctccccctggggtggcccaccgcatgggtacagggggttccaggaatccaaatccagcatggcttggaggagctctgttggtgagaggtcgccctgcctcactggcaccctgggggcacagctggaagagaggcctggcccatgctcctctcagggcaggcacatgtacggggcatacaaggcacagcgcctgttggaacaggtggctgtgttcctgctctggcccccgtgcggctngcctccgcccctgcaccagtcacatgcactggacgagggccgaaactcctgtctgctatcgagccctggtgctatgtggccccggagccacagcacaatcatctcagtggcgaagcacaccacttgattctatttttttttaacacattaaatctgtttttaaagataaaaaaaaaaaaaaaaaaaaaaaaaaaaaaaa

SEQ ID NO: 95 - DNA, 707 bp, Homo sapiens
  misc_feature (45): n equals a,t,g, or c
atttaggtgacactatagaaggtacgcctgcaggtaccgttccgnaattcccgggtcgacccacgcgtgccatcatggcgcaggatcaaggtgaaaaggagaaccccatgcgggaacttcgcatccgcaaactctgtctcaacatctgtgttggggagagtggagacagactgacgcgagcagccaaggtgttggagcagctcacagggcagacccctgtgttttccaaagctagatacactgtcagatcctttggcatccggagaaatgaaaagattgctgtccactgcacagttcgaggggccaaggcagaagaaatcttggagaagggtctaaaggtgcgggagtatgagttaagaaaaaacaacttctcagatactggaaactttggttttgggatccaggaacacatcgatctgggtatcaaatatgacccaagcattggtatctacggcctggacttctatgtggtgctgggtaggccaggtttcagcatcgcagacaagaagcgcaggacaggctgcattggggccaaacacagaatcagcaaagaggaggccatgcgctggttccagcagaagtatgatgggatcatccttcctggcaaataaattcccgtttctatccaaaagagcaataaaaagttttcagtgaaaaaaaaaaaaaaaaaaaaaaaagggggcccccttttgggggtcccctggggg

SEQ ID NO: 96 - DNA, 815 bp, Homo sapiens
  misc_feature (16): n equals a,t,g, or c
  misc_feature (45): n equals a,t,g, or c
  misc_feature (50): n equals a,t,g, or c
aaccccctactccctnccgtaatttttgtaagcccttaaaataanaaatnaaaaatyccataacccccaaagaagaatcccccccacattwagccttgttaagtaaatgcctcctgaccccaagcccgaagatgccccccattctctwagtgatggcggcgttagggtttgagagaagggaatttggctcaacttcagttgagagggtgcagtccagacagcttgactgcttttaaatgaccaaagatgacctgtggtaagcaacctgggcatcttaggaagcagtccctggagaaggcatgttcccagaaaggtctctggagggacaaactcactcagtaaaacataatgtatcatcatgaagaaaactgattctctatgacatgaaatgaaaattttaatgcattgttataattactaatgtacgctgctgcaggacattaataaagttgcttttttaggctacagtgtctcgatgccataatcagaacacactttttttcctctttctcccagcttcaaatgcaaattcatcattgggctcacttctaataactgcagtgtttcccgccttgggcttgcagcagaaaaacctgacaacatagtgtttgctaaggcagtaatttagactttaccttatttgtgattactgtagtgattgattgattgattactattaactacaaggtataatttactatcaccttatttaaattttatgaattaatttgaatgttttttacactaactaacttttcccaataaagtccactatgaaaccacgacaaaaaaaaaaaaaaaaaaaaaaaaaaaaa

SEQ ID NO: 97 - DNA, 658 bp, Homo sapiens
  misc_feature (627): n equals a,t,g, or c
  misc_feature (634): n equals a,t,g, or c
  misc_feature (635): n equals a,t,g, or c
catcattggcgcggggctgtcagcggccggacgcggtcctctacgcccgccactacaacatcccggtgatccatgccttccgccgggccgtggacgaccctggcctggtgttcaaccagctgcccaagatgctgtaccccgagtaccacaaggtgcaccagatgatgcgggagcagtccatcctgtcgcccagcccctatgagggttaccgcagcctccccaggcaccagctgctgtgcttcaaggaagactgccaggccgtgttccaggacctcgagggtgtcgagaaggtgtttggggtctccctggtgctggtcctcatcggctcccaccccgacctctccttcctgcctggggcaggggctgactttgcagtggatcctgaccagccgctgagcgccaagaggaaccccattgacgtggaccccttcacctaccagagcacccgccagragggcctgtacgccatggggccgytggccggggacaacttcgtgaggtttgtgcaggggggcgccttggctgtkgccagctccctgctaaggaaggaacagaaccacctacatcgccaaccctggtccagcctragaggaatacatcctctgatcgacctcaaatccggagttnccccttnncttgtcaaattgaccgcccaata

SEQ ID NO: 98 - DNA, 249 bp, Homo sapiens
  misc_feature (248): n equals a,t,g, or c
aaaatggtagacctgacagtaccggtccggcaattcccgggattttgagctggggttttgagactscccttagagatagagaaacagacccaagaaatgtgctcaattgcaatgggccacatacctagatctccagatgtcatttcccctctcttattttaagttatgttaagattactaaaacaataaaagctcctaaaaaatcaaaaaaaaaaaaaaaaaaaaaaaaaaaccccggggggggcccng

SEQ ID NO: 99 - DNA, 752 bp, Homo sapiens
  misc_feature (612): n equals a,t,g, or c
acggcttcaaccgcagcttctgcggccgcaacgccacggtctacgggaagggcgtgtatttcgccaggcgcgcctccctgtcggtgcaggaccgctactcgccccccaacgccgatggccataaggcggtgttcgtggcacgggtgctgactggcgactacgggcagggccgccgcggtctgcgggcgccccctctgcggggtcctggccacgtgctcctgcgctacgacagcgccgtggactgcatctgccagcccagcatcttcgtcatcttccacgacacccaggcgctgcccacccacctcatcacctgcgargcacgtgccccgcgcttcccccgacgacccctctggrctcccgggccgctccccagacacttaaccgaaggggccaccctctggcctcctgcttcccaggctcccagctccgcacaggctgatgctccccgcccccaactgtggccgcctgagctgtccccggggasgccctgcctccctctgcgggctccagaaggcggtgtgggggatggcggtcagcagcggccgaggggggccgggctaggtcccagcctgggccgaccccaccaccaggggtcagcagagcccaggaggngacaccgyccgcccgccgctcccagacctcgcccgagtcggctctgttgtttgaataaacgtgaacgtgaacccaggcggaagggacccgggaaaaaaaaaaaaaaaaaaaaaaaaaaaaaaaaaaaaaaaaaaaaaaaa

SEQ ID NO: 100 - DNA, 3059 bp, Homo sapiens
  misc_feature (14): n equals a,t,g, or c
  misc_feature (28): n equals a,t,g, or c
  misc_feature (109): n equals a,t,g, or c
  misc_feature (3019): n equals a,t,g, or c
  misc_feature (3047): n equals a,t,g, or c
  misc_feature (3058): n equals a,t,g, or c
  misc_feature (3059): n equals a,t,g, or c
ggggtaaaaccccngaaaaaaactccanattttaattaaatggcctcctcccttccccccttctttccccccgtcccccaactccctttcctcgtcctctttccccccncccctctcccttttctccccatctttcaccttcctaatttcagtgaaattggagcgatttgaaattccaatcaaggttcgattaagcccagagccatggacccctgaaactggtttggtaactgatgctttcaaactgaaaaggaaggagctgaggaaccattacctcaaagacattgaacgaatgtatgggggcaaataaaatgttgttgtcttattgacagttgtgcaggaggtagcctggtggttttcaacctctagaattttaagcctttgttgaactgttagaatgtaaggtatatcattctaaagatagagtaaaaagaaaacaaaaccaaaagttattaaaattgttgtccggtttactttaacttagttttgcatagttctagtgcagctgaaattgaaaagttatttccctttagctgtgttattatagagcagaaattctgtttttaaaaattagcctaagatatacttgtttttgtaaagaaaaatatttaatgttgaacaaaataaattggagttggagtagaatgtagtttgaggaaatttgcagcttccaatgcctcttgtcttcctatttcagaagtttaaatattaagcatgacagaaaatatgtattaacactactcaaagcaaaagtgctgcagggctttaaaattctcttccaaccatttatcttgaaggaaaaattcaatagtaatataatacmcaaaatcaaataataccttagaaggtattaagattataattgttgcataggttagatatagagtcattgtaatgttgtgaataattacagtgcctaaaataagaatagaacaacatatacaacaccaaaaaatatctagtaatatatttaaagggaaattgagctgctttttttgaaactttgagatctaaaaataactgtaattatttgaatgactaagaggaaagtacattttttgaaatgctgaaaattgcctttctgtgtttattcaaactgaaaagctgagaccaagagcaaggaaggtaaaaagttaacaggcaaacattttctcttagaaaaggtgataaaatcataagtatttggaattagaacccttkcacagcactgaacctgggaaagagatttaaactctgaatttatctttgataacagggattgattttaaaatgtacatgtattaaattacatttgtaatttaaggtctgtttgctgttgctgattttattcttgatcagtagtttgcatttcagaaagcctttcattttgctttaattttagcaaagcgggttataatgaatgacttccccaatatcttgcttgaacttacaggtgattaacttggatgagttttgggaagttaaagggaagaaaacactgttatcattttttcctgtttgggaagagcttagaaactggaaatactagatttgggagaagggcagagttacttgataagggactgatgtttgtgcagtaacttgggagtgtggtttctttttgaatctttaattaaaacctgggattatatatccctgataaatattcacacttgaaccatagttactgtaaaatgcaaaaaatcttaatactgttattctttgcactttttcttaatcattttttatatatatgcatatatatatgtgtgtgtgtgtgttgcttatgttgttttgtacagatgtgggccaccattgcaacaaaatacattctttttgctctaaaatatttatgaagaaaatacttaaatgttatgtatatggtggtaataagggaaaaatcaagtattataaacaagaatgaaggtttttgtaaagatttctgttcagcgttttgcaaggtaaaattttaggcaagttttccctgaagttatgtgtatgtgagtattctcattcttcccaacttgcctttgaagagtgaaataccattattatcaagtagactactgttcagcttttattcctgccctgctgtttatcccttaagaatgagtttcttagacttttccaatatgtgattttttttcccatttagaatggtgattttaaatgtgtgagtgcatgtactatcttatctcagatatttgcacccccaatctgcccccaactcccaaaagctagaacactgccaactgatctgttataggtcctttagaaacacataattaacacttaaggttgggtgctgctaattctttgcaaaaatccaaatattgttaagggaccagggagatgccactaccccttgattttccatctaaaaatatacatgtttatgtaaacaaatctttccatatccatagtgacttttcaagtatttaagcctaaagattttgatctcacatttttatacctgtttaaattgctcacagttattacatacacatcagccatcaactaaagttgtactttaaaaatttactacaatatgtacatttctaagtcaaacacttgtgacttttgctttaattccatgaatgttcctgcctccttgatatttgtatttattctttttttctctagagtagaggtataattgtgtgatatttcagaaatacagataaatgattcaaaaagtcacagttaaggagaatcatgtttctttgatcatgaataactgattagtaagtcttgcctatattttcctgatagcatatgacaaatgtttctaaggtaacaagatgagaacagataaagattgtgtggtgttttggatttggagagaaatattttaatttttaaatgcagttacaaattataatgtattcatatttgtactttctgttaaaatgcatgattgcagaattgtttagattttgtgtttattcttgatgaaaagctttgtttgttcttgtttttaagtttgcactcaaatcttaagaaataaatccacccatgttatcaaaaaaaaaaaaaaaancccgggggggggcccggaaccaaatccncccaagggggnn

SEQ ID NO: 101 - DNA, 1682 bp, Homo sapiens
  misc_feature (52): n equals a,t,g, or c
ggcacgaggatggawgcctgatggggtgcagacacagatggcaccccaggrntgtgccattccaccagacgtctcctaagacagagttagagtcaacaatctttggcagtccgaggctggctagtgggctcttcccagagtggcagagctgggggagaatggagaacttggcctcttatcgatgaattaagcaacaatgtaactggtcttgacttgtcatattcccccatgcaatcctaggtctgtattgctcaattttaggaagcctttgctactccatcagtaggtttagatttgagcttttgagacctggctatggaaaagaaagacacttgagaatttagtgttggggtctgtacagatgatgctacccaatttggctttgaaggatcaagtaacaggttgaaaactatttttataaaggtaatactttttcagttcccttcttccttccctctcaatccactagctttcatgttgggcaaggaaaagttgaggaaggatggctgatggtgatggaaagctgtgttaatggtatgaggaatgtgtgaaaagtatacacaaagggctctgaagctcaagtcagaggagtgggaggtctgatcattgttggtggaaaaacgtaaggttattttgtgtttttaagttggttttacaattctttcctggggaaattatttctggaggggaaaaagatccattctacgtatccttgtggagaaaagctaaataacctttaagaatgtgggtggtattggagaaagaagatgaattatagctccggagaatcaagatcttaagtgaagcctttctgttcagatgtgatctataaaaaatcataatttggggaaagtttaagcaaatctggctttgtagtcctgatgttataagtgactttgtgatcaaactgtcaggcttgggttcttgttatagaatgcttggtatagaaaaaccatgccatcattaatggctaacaacacgtagggacttcatgtcatgtcaaagatagctctttgcaagtgccttgattaaaccagaaaactgtcatcgtttaacccaaatatctgaatggtcatctggtaactcatgggtttttggcctcataagatggtccactctgtacacaggcattcctcctgcaataatgttgtatctttgagaccgttgtcagtgtacacaactcacatccttcatattgaaggtgactcatttttctgcacacttttttgatgtgatgcttgacgtgaggcccgacactaggattctcaatgcaagaatccagtaccttgcacatagaagtagcaacccatcccttgcctattttcatcttgctgttttcttttttttaaaaaaatggatgtgacttgttttgaatgttttgtattatacttgtttttgtgtgtgcataaattcattctgtaggatcttaagaaaaagagtcccagaatgttgcttctattattgtgcacaaccattgagaggtgttacaagaatgcagttaattttaacatgtgtgatgtgccatggtggaaaagtactatcggaataactctgcagtgacagaatttgaagtttggctagcatccatacttttctactgtaaatatttcactctcctctagctatccttgatgagcttctcactttaagaataaatgtgtttgatataaaaaaaaaaaaaa

SEQ ID NO: 102 - DNA, 938 bp, Homo sapiens
  misc_feature (30): n equals a,t,g, or c
  misc_feature (812): n equals a,t,g, or c
  misc_feature (913): n equals a,t,g, or c
cccacgcgtccgtccgggtgctcgcgcgcngacctggacgcagagaagccagagactttcgcttccggctgccgcaggcttcgctggtgcaggtaagctccgcacactctcggccggtcccgagtccgactccctcaagggtgacgcgagctctgccctttaaccggaaacgtctccctgctcaccccacccccgcgcagacgcagtgctgagcacacagctaccggacaaagagtgacgcccggagctggagttatggcggctacggagccgatcttggcggccactgggagtcccgcggcggtgccaccggagaaactggaaggagccggttcgagctcagcccctgagcgtaactgtgtgggctcctcgctgccagaggcctcaccgcctgcccctgagccttccagtcccaacgccgcggtccctgaagccatccctacgccccgagctgcggcctccgcggccctggagctgcctctcgggcccgcacccgtgagcgtagscctcaggccgaagctgaagcgcgctccacaccaggccccgccggctctagactcggtcccgagacgttccgccagcgtttccggcagttccgctaccaggatgcggcgggtccccgggaggctttccggcagctkcgggagctgtcccgccagtggctgcggcctgacatccgcaccaaggagcagatcgtggagatgctggtgcaagagcagctgctcgccatcctkcccgaggcggctcgggcccggcggatccgccgccgcacggatgtgcgcatcactggctgagcggtggagctgcgggcngccagggccgggcgctctgtgcggactggggccatgatcgggcccgggggcctgagcctgggaccccaccccgtgttaatgaaaaatgagttttggcagcnaaaaaaaaaaaaaaaaaaagggcgg

SEQ ID NO: 103 - DNA, 2012 bp, Homo sapiens
  misc_feature (1993): n equals a,t,g, or c
  misc_feature (2002): n equals a,t,g, or c
gctggataattccagcctgttagctactcacaggaacatgcagaattattggctccagggagttttggagaaagaaggtttacgttttcaaacttacagataacagttgacatcaatgcttctctttcccagaacaatctggagtttgccagaaaactctgtaaacaggagtcgtgctgtgtgtgaactgtaaactcttctctccaggcgtcgaggggacctttgctttactttgcagctgggctacatcagacgtgtgcattggaaacataaacttccttaactgggaaaagaatgcttctctgtcttcmaaatarttctgctatgtgacatttttgccatcatgaattttacatcagtgmtagctctttgttttacgtgtttcattkggcaggtcacaaaggctcttggctaccacacatacgtgcatacacacacacacacacacacacacacacacacacactcataaaggattttcttttctgctttacctttaattttcagtctacttggcttgtaatgaaaggtagagccttatttttgaactatatcccaacagaatcgaatttccattttgccaagaattataaaaccctgaggttttaaaattcagtttcttttctggggatttaacatggaaggacttggagggcaaatggsccagtgattggaaargggaaaaacaawtcatttcatttaaaattattcaataaccattgccagcatttgggattctgagtgctgtttatgaagccctttcattgatataatttcatctatctctcacaaggctgtaagcaattcctatgtccatatggcagtgaggaaatggagatttgagcaggttaagggagttttcacctggaagctcttcttttttttccttctgccacagtarggtcatcagactgtcagccccagcactgggagccgagtaacacgcatgttctcattaatatccttttctcatgtttttattaaagatatatgcaagttgccgaaagacgaaggaacttgcagggatttcatattaaaatggtactatgatccaaacaccaaaagctgtgcaagattctggtatggaggttgtggtggaaacgaaaacaaatttggatcacagaaagaatgtgaaaaggtttgcgctcctgtgctcgccaaacccggagtcatcagtgtgatgggaacctaagcgtgggtggccaacatcatatacctcttgaagaagaaggagtcagccatcgccaacttgtctctgtagaagctccgggtgtagattcccttgcactgtatcatttcatgctttgatttacactcgaactcgggagggaacatcctgctgcatgacctatcagtatggtgctaatgtgtctgtggaccctcgctctctgtctccaggcagttctctcgaatactttgaatgttgtgtaacagttagccactgctggtgtttatgtgaacattcctatcaatccaaattccctctggagtttcatgttatgcctgttgcaggcaaatgtaaagtctagaaaataatgcaaatgtcacggctactctatatacttttgcttggttcattttttttcccttttagttaagcatgactttagatgggaagcctgtgtatcgtggagaaacaagagaccaactttttcattccctgcccccaatttcccagactagatttcaagctaattttctttttctgaagcctctaacaaatgatctagttcagaaggaagcaaaatcccttaatctatgtgcaccgttgggaccaatgccttaattaaagaatttaaaaaagttgtaatagagaatatttttggcattcctctaatgttgtgtgttttttttttttgtgtgctggagggaggggatttaattttaattttaaaatgtttaggaaatttatacaaagaaactttttaataaagtatattgaaagttaaaaaaaaaaaaaaaaaaaaaaaaaaaaaaaaaaaaaaaaaaaaanaaaaaaaanaaaaaaaaaa

SEQ ID NO: 104 - DNA, 1094 bp, Homo sapiens
  misc_feature (26): n equals a,t,g, or c
tcctcctgggaagcctggcctgcctnccccgcaaaaggtgtttttgcgctggttcaatgaatagatgatgcagaggccccattggagacacgtgaatggcgtgtgcggccatcagttcccggctggggggcaggtgttgcttcggcccccgccctccggccggcgtgtgcgagtgcgcccctggctgtgagtgttgaccgttcctctcccctgtacatagcmcgagccagtcctgagtgggtgactcctgagtgggtgacgcgcagacgggatttctcaggtcatttgtatggtcgacatgatggctgctgctttggctgccaccacccccgggcccagcctgtctgaaattcagggtttaggccgaaaaacccggtggggaggggtggggagccggagmtctgtggcggggctggagggctggggtgcactttagtttggggcgggacgggagccgccgttgtgactggcgtggtctggctgctgctcccgaacggaggggtcggggttggcttgctgggccctcagagcccagtgggtggctctgactcggctccctactccctgcacccagctgggcgcacttggggcctgcggtctgaatgtatccctcccctcagttttaacctgagctgccgaacgcacagtgggccgggggcgaggctgggggaagcggggcccaattacggatcccgggagttacaggtgccgacgtgatgtcgcttctctggtgcccagctcccttcctggtctgagactagctctgggggtggcgggggcccccamacgctgctcccgctccaccctgcccgtgctgctgctctgtgcctgctgtcagagccctggtgggggaggatgtggccaccctgagacccggaggagacgggcgtctgcctgggtttgcggagagccgcttatgggtgtggtccgtccagacaccttgtttcaagggggatgggcgtgagcgggcaagcagagcatccccaccgctgagcaagaactttttcttgtttttaaaccatcacgtcctcatttcacattggaataaagtgagtttttgaaacctgcgaaaaaaaaaaaaaaaaaaaaaattc

SEQ ID NO: 105 - DNA, 2297 bp, Homo sapiens
  misc_feature (30): n equals a,t,g, or c
agctcgtgcgcccgccgtgccggtccgganattcccgggtcgacccacgcgtccgatctgtcctgcaccatctgcctaattccttcctcacagtctgtagccatctgatatcctaggggaaaaggaaggccaggggttcacatagggccccagcgagtttcccaggagttagagggatgcgaggctaacaagttccaaaaacatctgccccgatgctctagtgtttggargtgggcaggatggagaacagtgcctgtttgggggaaaacaggaaatcttgttaggcttgagtgaggtgtttgcttccttcttgcccagcgctgggttctctccacccagtaggttttctgttgtggtcccgtgggagaggccagactggattattcctcctttgctgatcctgggtcacacttcaccagccagggcttttgacggagacagcaaataggcctctgcaaatcaatcaaaggctgcaaccctatggcctcttggagacagatgatgactggcaaggactagagagcaggagtgcctggccaggtcggtcctgactctcctgactctccatcgctctgtccaaggagaacccggagaggctctgggctgattcagaggttactgctttatattcgtccaaactgtgttagtctaggcttaggacagcttcagaatctgacaccttgccttgctcttgccaccaggacacctatgtcaacaggccaaacagccatgcatctataaaggtcatcatcttctgccacctttactgggttctaaatgctctctgataattcagagagcattgggtctgggaagaggtaagaggaacactagaagctcagcatgacttaaacaggttgtagcaaagacagtttatcatcaactctttcagtggtaaactgtggtttccccaagctgcacaggaggccagaaaccacaagtatgatgactaggaagcctactgtcatgasagtggggagacaggcagcaaagcttatgaaggaggtacagaatattctttgcgttgtaagacagaatacgggtttaatctagtctaggcaccagatttttttcccgcttgataaggaaagctagcagaaagtttatttaaaccacttcttgagctttatcttttttgacaatatactggagaaactttgaagaacaagttcaaactgatacatatacacatatttttttgataatgtaaatacagtgaccatgttaacctaccctgcactgctttaagtgaacatactttgaaaaagcattatgttagctgagtgatggccaagttttttctctggacagkaatgtaaatgtcttactggaaatgacaagtttttgcttgatttttttttttaaacaaaaaatgaaatataacaagacaaacttatgataaagtatttgtcttgtagatcagggttttgktttgkttttttaattttaaaatgcaaccctgccccctccccagcaaagtcacagctccatttcagtaaaggttggagtcaatatgctctggttggcaggcaaccctgtagtcatggagaaaggtatttcaagatctagtccaatctttttctagagaaaaagataatctgaagctcacaaagatgaagtgacttcctcaaaatcacatggttcaggacagaaacaagattaaaacctggatccacagactgtgcgcctcagaaggaataatcggtaaattaagaattgctactcgaaggtgccagaatgacacaaaggacagaattcctttcccagttgttaccctagcaaggctagggagggcatgaacacaaacataagaactggtcttctacactttctctgaatcatttaggtttaagatgtaagtgaacaattctttctttctgccaagaaacaaagttttggatgagcttttatatatggaacttactccaacaggactgagggaccaaggaaacatgatgggggaggcagagagggcaagagtaaaactgtagcatagcttttgtcacggtcactagctgatccctcaggtctgctgcaaacacagcatggaggacacagatgactctttggtgttggtctttttgtctgcagtgaatgttcaacagtttgcccaggaactgggggatcatatatgtcttagtggacaggggtctgaagtacactggaatttactgagaaacttgtttgtaaaaactatagttaataattattgcattttcttacaaaaatatattttggaaaattgtatactgtcaattaaagtgtttttgtgtaaaaaaaaaaaaaaaaaactcgta

SEQ ID NO: 106 - DNA, 442 bp, Homo sapiens
  misc_feature (419): n equals a,t,g, or c
  misc_feature (423): n equals a,t,g, or c
tcgacccacgcgtccgcctgtgggacgcggtggtggccgttgggtcgggagagtgagcggtatttgcmtcgtttttcttgcttgttttccccccgttagactttgtcggtagagcgcggttatgggccgcaagaagaagaagcagctgaagccgtggtgctggtattgtaatagagattttgatgatgagaagattcttatacaacaccaaaaagcaaaacattttaaatgtcatatatgtcataagaagttgtacacaggacctggcttagctattcattgcatgcaggtgcataaagagacaatagatgctgtaccaaatgcatacctgggagaacagacatkgattggaaatatatggtatggaargtattccagaaaaagatatkgatgaaagaagacgacttcttggaacaganaacnccagagagtccaaaaaaag

SEQ ID NO: 107 - DNA, 1019 bp, Homo sapiens
  misc_feature (995): n equals a,t,g, or c
ttgatctgcggctgtcgaggcctgaggcagtggaggctgaggctatgatggcggccatggcgacggctcgagtgcggatggggccgcggtgcgcccaggcgctctggcgcatgccgtggctgccggtgtttttgtcgttggcggcggcggcggcggcggcagcggcggagcagcaggtcccgctggtgctgtggtcgagtgaccgggacttgtgggctcctgcggccgacactcatgaaggccacatcaccagcgacttgcagctctctacctacttagatcccgccctggagctgggtcccaggaatgtgctgctgttcctgcaggacaagctgagcattgaggatttcacagcatatggcggtgtgtttggaaacaagcaggacagcgccttttctaacctagagaatgccctggacctggccccctcctcactggtgcttcctgccgtcgactggtatgcagtcagcactctgaccacttacctgcaggagaagctcggggccagccccttgcatgtggacctggccaccctgcgggagctgaagctcaatgccagcctccctgctctgctgctcattcgcctgccctacacagccagctctggtctgatggcacccagggaagtcctcacaggcaacgatgaggtcatcgggcaggtcctgagcacactcaagtccgaagatgtcccatacacagcggccctcacagcggtccgcccttccagggtggcccgtgatgtagccgtggtggccggagggctaggtcgccagctgctacaaaaacagccagtatcacctgtgatccatcctcctgtgagttacaatgacaccgctccccggatcctgttctgggcccaaaacttctctgtggcgtacaaggaccagtgggaggacctgactcccctcacctttggggtgcaggaactcaacctgactggctccttctggaatgactcctttgccagctytcactgacctatgaacgactctttngtaccacagtgacattaaagttat

SEQ ID NO: 108 - DNA, 711 bp, Homo sapiens
  misc_feature (642): n equals a,t,g, or c
cttgaaaacttagtttactatacatcttgccctattaatatgttctcttaacgtgtgccattgttctctttgaccattttcctataatgatgttgatgttcaacacctggactgaatgtctgttctcagatcccttggatgttacagatgaggcagtctgactgtcctttctacttgaaagattagaatatgtatccaaatggcattcacgtgtcacttagcaaggtttgctgatgcttcaaagagcttagtttgyggtttcctggacgtggaaacaagtatctgagttccctggagatcaacgggatgaggtgttacagctgcctccctcttcatgcaatctggtgagcagtggtgcaggcggggagccagagaaacttgccagttatataacttctctttggcttttcttcatctgtaaaacaaggataatactgaactgtaagggttagtggagagtttttaattaaaagaatgtgtgaaaagtacatgacacagtagttgcttgataatagttactagtagtagtattcttactaagacccaatacaaatggattatttaaaccaagtttatgagttggtttttttcattttcyatttgtattttattaagagtgcttttcttatggtgatttttttnaattgcgatttgatatggtttggccatatggccccacccaaatccccatcttggattataatccccatg

SEQ ID NO: 109 - DNA, 743 bp, Homo sapiens
tcgagtttttttttttttttttttactttttaaaattttattgatgtaccacctgatcaaagcatgggatattttaatagtattatacataatatttttacatagaaaactttacatagcatttcatattatataattctgcttattctttcaaaaatttatacatccattgggcaaggaatggttttcattaaattaccaatattaaatgcacttaatcattgtgtataggttaaaccaaagtaactattaactaacttttaggcattttaaggaggtaaaacatacattttacacataaatatttgatgcaaatatgcagataaaattttttaaaaattagaacactgagtaaaacacctttgatagattatattgttttgttttgagagcaaggatttccagatatgttcattctttaaaacactcagctttggtttctttgtttcccaaactgcaaagctgctgataacaaaactccaggattccatgtgagttcagctatgtctactttaacacaaatattaaaacagaattcagraaatgcagtattaaggatccagcttctattgaaaccaatatccatttgcatcataacaacaaacatttgaatgagatggtcacacttgtacttatcagcaggttcctttaataacaaagactactaaatgtatatccttaatcacaaaagaacaacaaaaaaaatacaggttttttttttttcatttcgtacaaaagtcacc

SEQ ID NO: 110 - DNA, 795 bp, Homo sapiens
  misc_feature (2): n equals a,t,g, or c
  misc_feature (645): n equals a,t,g, or c
  misc_feature (737): n equals a,t,g, or c
tnctaaatatcagatgtctttgatgtaagggtagggaatggagaaatattttcaattgtgtatttgtattacaaagaacttgaaatttactttcttagttgattatattaaatgatgtatatattatatgtggtttataagctcaacactggccatttttttagttttattgttaaatggtatttttctatgtttaattataatagatctggctttttctggatagcataaagatcactgaactatatatatataagaracaagagttctattttagcacaaaggcattttatattatttattgaatccataagtttgttttcgtcaaaaacattccatattatttctgctcctttttatttgtatagtttgttatttaaagaaatggcagtccttcctgttcttaatacaataaaattgaaataatgcacctagtaatgtggccgacatctcttctcaccaccatggactgttttcaacaacagttgatcttctggtctgtgctgagaggcgcatgcatgtctttcgtcacgtcgggcagcacacctgctgtgaaatactgctttcatctacctcttcagaaggcttcttgcttgttgacaagtaccgcaaaggctttattctggactggctatctcataaaanggatttctgtaagactttgcagtgtcattccctcagaaccyaggtttgtttctaaagccacggtattgtccrrgrrcccctgtgtktggggncaggtagctatccctcccatgtcattagtaatcctttaggattttaaggtacaatggg

SEQ ID NO: 111 - DNA, 1332 bp, Homo sapiens
  misc_feature (1): n equals a,t,g, or c
  misc_feature (6): n equals a,t,g, or c
  misc_feature (1194): n equals a,t,g, or c
  misc_feature (1237): n equals a,t,g, or c
  misc_feature (1241): n equals a,t,g, or c
  misc_feature (1300): n equals a,t,g, or c
ncgggncagcagctcccagtgtgacctgacaaaaacacgtaggggcagggacggtccccacccccagggacacaacccctggtcttggaccagtagaggacacggagggttcagacccctcctcagaccctccccacatctgaaactgcctccccccaaccaccagcagcagcagggccctcctcccccaccagctctccccacagggcccctcagcatcatggagacccgcagcggggcttagccacccctcaaacccagggccccctggcacctgggctctggccgtgttttctggccagagccccactttcctaactcgtgctcccttccgccttcttttccgtactgtgaagaaagaactctccaccccagctcccaccctgccctggcctgggtggaggaactgtgcctccatccccagaagaaacagccccctctgctgctggggtgggactgtctgtgtgccctgtgggggtccgtgtgagcaggcccacctggctccagacccgcccccaacctgagacagaaccaggctgagccaggcctccacccccacccccgtttgctgggggctcctccagccgcccccatggraagaggcctggtaccgsctcacccacagaggtctgtgccaggtgcgcttctgcaggtggagccaagctctccctgaggccagaggcggggcctgggccgggagcccaggggaaggccaggctggaccccggctycacacccacatccagcctgcaggcctctctgcagtcctctcaccctccctmagctccccttcctctgcagtcaccctcagctccccttccttgcccgcctctccccccgccgccccaccagttaaacggatgaccaaagacctttcttatgccggaagcaaaaaccaaaactttttgttggctttttcctttgtsgcctccccagcacctgccctcccagtctcccaccccggccccaggctggaagcctccctccacttaagttattgttttaaaccaaagtttacagtgtctgttggtggccaagaccttctctctccacccctcctccatccaccctgaggaccctggggctcagtggaggcagggccctgccccccttccctttccggctcctggcccagcctggggggaagggaraaagggagggggaraaagcggggttcttcaccccctcagggantggggcacggggagccctttcttccctggaccctggggcttgnttcntgggggggctcttccaagaacccctcttctaagggaaccaagtttcacccgttcgtggntgggggatgttgggatttctaaggcaaaagag

SEQ ID NO: 112 - DNA, 743 bp, Homo sapiens
  misc_feature (53): n equals a,t,g, or c
  misc_feature (272): n equals a,t,g, or c
  misc_feature (275): n equals a,t,g, or c
  misc_feature (278): n equals a,t,g, or c
  misc_feature (590): n equals a,t,g, or c
  misc_feature (618): n equals a,t,g, or c
ttgctggtctgatccatgcacatggccaggctgctaggctcttgtgctgggcnggaagtcggtgcggatggccagctccaggatgacccgccgggacccgctcacaaataaggtggccctggtaacggcctccaccgacgggatcggcttcgcatcgcccggcgtttggcccaggacagggccacgtggtcgtcagcagccggaagcagcagaatgtggaccaggcggtggcacgctgcarggggaggggctgagcgtgacgggcacctgtncantgntggggaaggcggaggaccgggagcggctggtggccacggctgtgaagcttcatggaggtatcgatatcctagtctccaatgctgctgtcaaccctttctttggaagcataatggatgtcactgaggaggtgtgggacaagctctggatggacaaggaaaaagaggaaagcatgaaagaaaccctgcggataagaaggttaggcgagccagaggattgtgctggcatcgtgtctttcctgtgctctgaagatgccagctacatcactggggaaacagtggtggtgggtggaggaaccccgtcccgcctctganggaccgggagacagcccacaggccaganttgggctctagctcctggtgstgttcctgcattcamccaytggscttttcccacctytgytcamcttactgttcacctcatcaaatcagttctgccctgtgaaaagatccagccttccctgccgt

SEQ ID NO: 113 - DNA, 1690 bp, Homo sapiens
  misc_feature (1659): n equals a,t,g, or c
  misc_feature (1664): n equals a,t,g, or c
  misc_feature (1676): n equals a,t,g, or c
aattcggcaccactcagtcccacaggcctcggccagggacacaccggccacgtccgcttcttggctgcagtccagctgccagatggcttcaacctgctctgcccaaccccaccacctcccccagacacaggccccgagaagctgccatcactggagcaccgggactccccttggcaccgaggccccgcccctgccaggcctaaaatgctggttatcagtggaggtgatggctatgaggacttccgactcagcagtgggggcggcasagcagtgagactgtgggtcgagacgacagcacaaaccacctyctcctgtggagggtgtgaccctgtctgccgtggcccaggactsgcccgcccacctgccttcagcctgcttgcctctccctagcccacacgcagactttgaccaggagtatccagccaggggacacatgtgcykgcrtgggctctgcttgtcttcgcggaagattcctgatggaacacccactggccagccaggccatggcttctcccgaccctctggctgccccggtgcttccagtcatgatcgggtgggggacatgtgggctgaccaggacctctgaccctggagcttctaccaaagacacagctgggtctggaccccacgggsstggggagggccatgtgcaatatttggagggttttctggagggcagcaggaaggctggggaattccccatgtacagtatttatgtttctttttagatgtgtaccttcccaagcacttatttatgcagtgacctggtcacctggggtgggggtgatttgaggaaatgacatgaggaaaagaaacctattcctgccctggggaccaccctgggactctaaccaagccttcctggagggacccatgcgcccctgagccccattccattcatacagacacacacgtacgcacactgcatgtccaaggccctaaacattgcccgttgacataaactttccagggccccagcctgatggggctgccctcagtcctctagatcaagatgctgactattagggggcagtgattgccatctggggacctgtcaggctttgtcatttcccagtttgttggtggtgcctttagtggttccctaatttgggaacactgatggggccttggacagggctttctctcaggtaggagaaatgggcccatgatctcctcacagtcgcccccagtccttggccctgcttccctgtgtctcatgcactggcacatatggtcaccttggagggcagacctaggagcccctctgaccactgaatccgtctccacaccccttctgccaagggaagccccttcaggaaggaccccccaaagctgaggggctgaatgtagccttttcaacagagaaggctcccacttgagagcagcctctacctgaccccctggaccacagagagccactctgaccctcagccccctcgcttcttcagctaaaactccaaaggtttggtttcagatggggtttgttttgttctgtttggttttggttttgtttggggtgggtgggtcattgcggtcttagattatgtttctcttgctaccaaacagtcatgtattaactctctttggatgatgaagtttaaagagtcaataaatagaaacaccagatgactgcaaaaaaaaaaaaaaaaaaaaaaaaanaaaanaaaaaaaaaaanaaaaaaaaaaaaaa

SEQ ID NO: 114 - DNA, 620 bp, Homo sapiens
ctctgggcctgggtctgggggagagggttgccagggagactcagctctccttgggggctggccagctgactgagggtacacaggattgggtctagaccttgatgcctgggtggagggcccttgtaaggggccatagcctcttcaggaccaactggagggagagttaggaaacaccagctcctgcctggggcagtgagggaatgggagcagctgtgggcgcctcatttcaggcaagtcctccccaaaccttcagatgcagtgagacctggccttcctgttgtgcttttcagactttgttttcagaatgcttttatctcgagtgtgcccttcggccctcacaagagcccctggggagtaggtggtggcctgtgccgtcatccccatttcaaagcagggagctgaggtcctgggaggggaaagtgcttgcctgaggtcccactgtgttagtgggtgggcaggactggaactcggttctccaacagcccagagctcactcttttacacccagaggtggagcaggtggcttagggggtggttatgtacttcacaagccaattcccttcagccaggagctcctgggtgcatttccgtgtcagaaacagtaccgagtcccaccccct

SEQ ID NO: 115 - DNA, 542 bp, Homo sapiens
  misc_feature (392): n equals a,t,g, or c
  misc_feature (412): n equals a,t,g, or c
  misc_feature (511): n equals a,t,g, or c
  misc_feature (521): n equals a,t,g, or c
  misc_feature (535): n equals a,t,g, or c
tcgacccacgcgtccgcttctcggccccttgtagaacctctgtcaggttcagcctactcgcctctactccagcctccactccggcctccaccatgtccgtcaggtgacccagaagtcctacaaggtgtccacctccggcccccgggccttcagcagccgctcctacaccagcgggcctggctcccgcatcagctcgtccgccttctcccgggtgggcggcasttccgggggggcctgaacagcagcatgagtgtggtcgggggctacggcggcggggccggggtatggggggcatcacggccgtctcagtgaaccagagcctgctgagcccccttwaagctggaatkggatcccaacatccaagctgtgcgcaacccaggagaaggagcagntcaagaccttcaacaacaanttggcttcgttcatcgacaagtgaagcactggagcagcagaacaaatttttggagaccaattggagcttcttaaagcagcagaagacgcgcggagaacntagacaaatnttcgagagtaaatnagaactt

SEQ ID NO: 116 - DNA, 525 bp, Homo sapiens
  misc_feature (420): n equals a,t,g, or c
  misc_feature (424): n equals a,t,g, or c
  misc_feature (517): n equals a,t,g, or c
aattcaaccgtcgttatcccaaaattcagttttcactttccaccggcccttccggcactatgctggatggtgtactggagggaaaactgaatgcggcgtttattgatggacccattaaccatactgccatcgacgggataccggtataccgcgaggaactgatgatcgtcacgccacaaggatatgcgccagtaacccgtgccagtcaggttaatggcagtaacatttatgccttccgcgccaattgttcgtatcgtcgccacttcgagagctggtttcatgctgacggtgccgctccgggaactatccatgagatggagtcttatcacggaatgttggcctgtgtgatcgcaggagcaggcattgcgcttattccgcgctctatgctggaaagtatgccggggcatcaccargttgaancgknggccgttagctgagcaatggcgttggttaacaacctggctggtctggccgtcgtggtgcgaaaaaacgttccgctcgaaggggggcccggtanccaattcg

SEQ ID NO: 117 - DNA, 728 bp, Homo sapiens
aacgagcgcctgctaggatcagcggtggtggttccgcgatggtaggcggcggcggggtcggcggcggcctcctggagaatgccaaccccctcatctaccagcgctctggggagcggcctgtgacggcaggcgaggaggacgagcaggttcccgacagcatcgacgcacgcgagatcttcgatctgattcgctccatcaatgacccggagcatccactgacgctagaggagttgaacgtagtagagcaggtgcgggttcaggttagcgaccccgagagtacagtggctgtggctttcacaccaaccattccgcactgcagcatggccacccttattggtctgtccatcaaggtcaagcttctgcgctcccttcctcagcgtttcaagatggacgtgcacattactccggggacccatgcctcagagcatgcagtgaacaagcaacttgcagataaggagcgggtggcagctgccctggagaacacccacctcttggaggttgtgaatcagtgcctgtcagcccgctcctgagcctggcctttgacccctcagcctgcatactggtatcctggtcccagctcctgccagggctgttaccgttgttttcttgaatcactcacaatgagaaactaacattttgctttttgtaataaagttaatttatattcarwtcaaaaaaaaaaaaaaaaaaaaaaaaaaaaaaaaaaaaaaacccgggggggggccccc

SEQ ID NO: 118 - DNA, 948 bp, Homo sapiens
  misc_feature (920): n equals a,t,g, or c
  misc_feature (944): n equals a,t,g, or c
agaagtacggacccctgaagcccctgccacagaccccgcacctggaggasgacttgaaggaggtgctgcgttctgaggctggcatcgaactcatcatcgaggacgacatcaggcccgagaagcagaagaggaagcctgggctgcggcggagcccatcaagaaagtccggaagtctctggctcttgacattgtggatgaggatgtgaagctgatgatgtccacactgcccaagtctctatccttgccgacaactgccccttcaaactcttccagcctcaccctgtcaggtatcaaagaagacaacagcttgctcaaccagggcttcttgcaggccaagcccgagaaggcagcagtggcccagaagccccgaagccacttcacgacacctgcccctatgtccagtgcctggaagacggtggcctgcggggggaccagggaccagcttttcatgcaggagaaagcccggcagctcctgggccgcctgaagcccagccacacatctcggaccctcatcttgtcctgaggtgttgagggtgtcacgagcccattctcatgtttacaggggttgtgggggcagagggggtctgtgaatctgagagtcattcaggtgacctcctgcagggagccttctgccaccagcccctccccagactctcaggtggagcaacagggccatgtgctgccctgttgccgagcccagctgtgggcggctcctggtgctaacaacaaagttccacttccaggtctgcctggttccctccccaaggccacagggagctccgtcagcttctcccaagcccacgtcaggcctggcctcatctcagaccctgcttaggatgggggatgtggccaggggtgctcctgtgctcaccctctcttggtgcatttttttggaagaataaaattgcctctctctttgnaaaaaaaaaaaaaaaaaaaagggnggcc

SEQ ID NO: 119 - DNA, 211 bp, Homo sapiens
  misc_feature (123): n equals a,t,g, or c
  misc_feature (125): n equals a,t,g, or c
tcgacccacgcggtccgcttggtggggtcggctgctttctcgcgtttccccccaaccccgtccggcctcgcccagcgtttccacgcggaaccaactgccagaggcgcggcgcggcgtcgagcngngcgagtgtgaggaaaccgccgcctcagccgagcgcgcgggcccgcccagggcgttagttttcggcgcgcagtcgcggtcccccggc

SEQ ID NO: 120 - DNA, 1308 bp, Homo sapiens
tcgacccacgcgtccggactgttctaagtgagttcgggtgggggagcttcacgaggggaggctgctctgtgaaggaaccgcctttctctccgcgtgtctcacccttttctccccatatctgtttggacatgagctgagggcacggtcgcgggcggtcagcctgttcgcagctacggcgaggaggggcgcgattgytccttgttgccgctccgcttagtggccgcgtccattccgcgcggtgtcccgattttaggggtagggagaagtgtcagcttcaggcatcgcgaggcgtggcggccccatggccccgctgggaggcgccccgcggctggtactgctgttcagcggcaagaggaaatccgggaaggacttcgtgaccgaggcgctgcagagcagacttggagctgatgtctgtgctgtcctccggctctctggtccactcaaggaacagtatgctcaggagcatggcttgaacttccagagactcctggacaccagcacctacaaggaggcctttcggaaggacatgatccgctggggagaggagaaacgccaggctgacccaggcttcttttgcaggaagattgtggagggcatctcccagcccatctggctggtgagtgacacacggagagtgtctgacatccagtggtttcgggaggcctatggggccgtgacgcagacggtccgcgttgtagcgttggagcagagccgacagcagcggggctgggtgttcacgccaggggtggacgatgctgagtcagaatgtggcctggacaacttcggggactttgactgggtcatcgagaaccatggagttgaacagcgcctggaggagcagttggagaacctgatagaatttatccgctccagactttagtcactaggttctaggagtgagctggggcctgctgaggtgggggtggggctgactctgcaaaatgggggtgtcccccgatcctggccgaggtgaggaacagacagggggggtctagattctgagggggttggtggatattgggcaaggcaggaaacctctggagacctcattttctccatggggaagacagccatgctcttcaggaggagactccaagggcaaaggagggtgtcttggctgtgcttgaaggcgaaaccctgccatatccccagtgccagtcccctcagcctgtggtggccttgcatcctgactggatgttctcagccccttgttctgggcaagaacccagagctccccagtgtggatactaataaacctcttggagcacaaaaaaaaaaaaaaaaaaaaaaaaaaaaaaaaaaaaaagg

SEQ ID NO: 121 - DNA, 2516 bp, Homo sapiens
gattgacattccagtgaaatgatgggagttaattgatttaatttagattagttgaaaattattacaaaatattctaaaagggttttttgtggtacttcaagaaacctgattagttttgatctattgaaatcacaaaagtagaacagggcwytttatttttgtataatttaggattaggtatgcttctttgttctaacaagtcatgttttctaacccttctttcactaagcaaaccagaacagatttgaactgttatgggttatatattagtatggagatcagctcagatgacattaaaaatgccgtagtgttattcttgtatgccaaatctttttttccccaaaattagcactttaattttatttactgttataatatttgttttcttagattaggtaggaaatcttaatttggccaccgcctactttgacaagtaaatattacatcatacgattttgcaacattaaattagaacactagaaactaaaaaattatgtttcagtgaatgctacaactaagcattttttttttttaagaaaaacaattgtattatgttttgttgccttgccactttgagtatcttatctgaaaatctgttccttgccatgtttttctcctgttaacataaactatgtgccctgtgaatttctggggactgaatttgaaattgctcctgccaaccgtttgtggcctggcgtgtatctgaatgcctgaatatctccccgctgaatgaatttcgtattctgccctgaattcactcgggtatattgattggctggatgatcttggtgccgcccacttgacgtttccagaagagtcaccgaagaaaagaaccaggagtgtagaggatgatgaggagggtcacctgatctgtcagagtggagacgtactaagtgcaagatgtatagaatatttttcaacacttattaacttttcagataacataatctatatatagattaagctttcagggatttggaaatctttttttctttctcttttttgtttttgttttatttttccatttcttttggtgggggggattgtatttttgctttctttagaaatgtaatgtttgttatatagaacttccagaacagtaatcaaattaatgaaattagacctaataattatgttttttgatggtgttgaccaataaaatatctagtgataaggaaatttgtagcatcaactagaataatctacattgatagcatttattgtgataagtacattgtttccacttcttgatatgactgagatttatttctctcttttagatgaaattgttgatactttaggtgaaggagcttttggaaaagttgtggagtgcatcgatcataaagcgggaggtagacatgtagcagtaaaaatagttaaaaatgtggatagatactgtgaagctgctcgctcagaaatacaagttctggaacatctgaatacaacagaccccaacagtactttccgctgtgtccagatgttggaatggtttgagcatcatggtcacatttgcattgtttttgaactattgggacttagtacttacgacttcattaaagaaaatggttttctaccatttcgactggatcatatcagaaagatggcatatcagatatgcaagtctgtgaattttttgcacagtaataagttgactcacacagacttaaagcctgaaaacatcttatttgtgcagtctgactacacagaggcgtataatcccaaaataaaacgtgatgaacgcaccttaataaatccagatattaaagttgtagactttggtagtgcaacatatgatgacgaacatcacagtacattggtatctacaagacattatagagcacctgaagttattttagccctagggtggtcccaaccatgtgatgtctggagcataggatgcattcttattgaatactatcttgggtttaccgtatttccaacacacgatagtaaggagcatttagcaatgatggaaaggattcttggacctctaccaaaacatatgatacagaaaaccaggaaacgtaaatattttcaccacgatcgattagactgggatgaacacagttctgccggcagatatgtttcaagacgctgtaaacctctgaaggaatttatgctttctcaagatgttgaacatgagcgtctctttgacctcattcagaaaatgttggagtatgatccagccaaaagaattactctcagagaagccttaaagcatcctttctttgaccttctgaagaaaagtatatagatctgtaattggacagctctctcgaagagatcttacagactgtatcagtctaatttttaaattttaagttattttgtacagctttgtaaattcttaacatttttatattgccatgtttattttgtttgggtaatttggttcattaagtacatagctaaggtaatgaacatctttttcagtaattgtaaagtgatttattcagaataaattttttgtgcttatgaaaaaaaaaaaaaaaaaaaaaaaaaaaaaagggaggggg

SEQ ID NO: 122 - DNA, 1139 bp, Homo sapiens
  misc_feature (1053): n equals a,t,g, or c
  misc_feature (1124): n equals a,t,g, or c
  misc_feature (1125): n equals a,t,g, or c
gtggcgcacggggtgggagcggacccaggccgggagcaggcgccgccgccagtgagaaccggggccggagccgggtgcggatttgctggggctgagtcgggggcgcgcgggccctgacctctgccctctgacctctcccctagcaggcgaccatggggaacgtgttggctgccagctcgccgcccgcagggccgccaccgccgcctgcgccggccctcgtggggctgccgccacctccgccctcgccgccgggcttcacgctgccgccgctgggaggcagcctgggcgccggcaccagtacgaktcgargttcggaacggacccccggggctgcaaccgccagcgcctcaggggccgccgaggatggggcctgcggctgcctgcccaacccgggcacattcgaggagtgccaccggaagtgcaaggagctgtttcccattcagatggagggtgtcaagctcacagtcaacaaagggttgagtaaccattttcaggtcaaccacacagtagccctcagcacaatcggggagtccaactaccacttcggggtcacatatgtggggacaaagcagctgagtcccacagaggcgttccctgtactggtgggtgacatggacaacagtggcagtctcaacgctcaggtcattcaccagctgggccccggtctcaggtccaagatggccatccagacccagcagtcgaagtttgtgaactggcaggtggacggggagtatcggggctctgacttcacagcagccgtcaccctggggaacccagacgtcctcgtgggttcaggaatcctcgtagcccactacctccagagcatcacgccttgcctggccctgggtggagagctggtctaccaccggcggcctggagaggagggcactgtcatgtctctagctgggaaatacacattgaacaactggttggcaacggtaacgttgggccaggcgggcatgcacgcaacatactaccacaaagccagtgaccagctgcaggtgggtgtggagtttgaggccagcacaaggwtgcaggacaccagcgtctccnttsgggtaccagcttggaacttgcccaagggccaacctcytctttcaaaggstctgttgggataagcaaanngggattcgtggggt

SEQ ID NO: 123 - DNA, 2114 bp, Homo sapiens
  misc_feature (1966): n equals a,t,g, or c
  misc_feature (2039): n equals a,t,g, or c
accccgcgcgccactcgctcgcgtcmgagggaggagaaagtggcgagttccggatccctgcctagcgcggcccaacctttactccagagatcatggctgccgaggatgtggtggcgactggcgccgacccaagcgatctggagagcggcgggctgctgcatgagattttcacgtcgccgctcaacctgctgctgcttggcctctgcatcttcctgctctacaagatcgtgcgcggggaccagccggcggccagcggcgacagcgacgacgacgagccgccccctctgccccgcctcaagcggcgcgacttcacccccgccgagctgcggcgcttcgacggcgtccaggacccgcgcatactcatggccatcaacggcaaggtgttcgatgtgaccaaaggccgcaaattctacgggcccgaggggccgtatggggtctttgctggaagagatgcatccaggggccttgccacattttgcctggataaggaagcactgaaggatgagtacgatgacctttctgacctcactgctgcccagcaggagactctgagtgactgggagtctcagttcactttcaagtatcatcacgtgggcaaactgctgaaggagggggaggagcccactgtgtactcagatgaggaagaaccaaaagatgagagtgcccggaaaaatgattaaagcattcagtggaagtatatctatttttgtattttgcaaaatcatttgtaacagtccactctgtctttaaaacatagtgattacaatatttagaaagttttgagcacttgctataagttttttaattaacatcactagtgacactaataaaattaacttcttagaatgcatgatgtgtttgtgtgtcacaaatccagaaagtgaactgcagtgctgtaatacacatgttaatactgtttttcttctatctgtagttagtacaggatgaatttaaatgtgtttttcctgagagacaaggaagacttgggtatttcccaaaacaggtaaaaatcttaaatgtgcaccaagagcaaaggatcaacttttagtcatgatgttctgtaaagacaacaaatccctttttttttctcaattgacttaactgcatgatttctgttttatctacctctaaagcaaatctgcagtgttccaaagactttggtatggattaagcgctgtccagtaacaaaatgaaatctcaaaacagagctcagctgcaaaaaagcatattttctgtgtttctggactgcactgttgtccttgccctcacatagacactcagacaccctcacaaacacagtagtctatagttaggattaaaataggatctgaacattcaaaagaaagctttggaaaaaaagagctggctggcctaaaaacctaaatatatgatgaagattgtaggactgtcttcccaagccccatgttcatggtggggcaatggttatttggttattttactcaattggttactctcatttgaaatgagggagggacatacagaataggaacaggtgtttgctctcctaagagccttcatgcacacccctgaaccacgaggaaacagtacagtcgctagtcaagtggtttttaaagtaaagtatattcataaggtaacagttattctgttgttataaaactatacccactgcaaaagtagtagtcaagtgtctaggtctttgatattgctcttttggttaacactaagcttaagtagactatacagttgtatgaatttgtaaaagtatatgaacacctagtgagatttcaaacttgtaattgtggttaaatagtcattgtattttcttgtgaactgtgttttatgattttacctcaaatcagaaaacaaaatgatgtgctttggtcagttaataaaaatggttttacccactaaaaaaaaaaaaaaaagggcggccgctctaaaggatccctcgaggggcccaagcttacgcgtgcatgcgacgtcntagctctctccctatagtgagtcgtattataagctaggcactggccgtcgttttacaacgtcgtgactggganatctgctagcttgggatctttgtgaaggaaccttacttctgtggtgtgacataattggacaaactacctacagag

SEQ ID NO: 124 - DNA, 583 bp, Homo sapiens
gcccggcctattcccttgggcttttaaaaagcgtcttggatggaggtggtgcaggtgctcaccaagcccgcagtaacccaagttgcatgtatccccagggcacttttgtgattcccctgcttgtgactgcacaccgggaccccactcaattcaaagacccagactgcttcaaccctaccaacttcctggacaagggcaagttccagggcaatgatgctttcatgccctttgcctcaggtgcaggcagaggaggaaggggaccagcctggactggctctggggtacctggtgctcactgtgcacctgtgtacccggcaaagcagatgtgcctgggcacaggcctggcccactcgggtatcttcctattccttacggccaccttacagaggttctgcctgctccctgtggtacgccctggcaccatcaacctcacctgcagtgcactggcctgggcagtgtccccccagacttccagctccagccagtggcctgctgaggtcaggctccactatggtgggctcactggccctcaaacctccataccctcctsggtcaataaaggccctaaattgcaaaaaaaaaa

SEQ ID NO: 125 - DNA, 1987 bp, Homo sapiens
  misc_feature (7): n equals a,t,g, or c
  misc_feature (14): n equals a,t,g, or c
  misc_feature (517): n equals a,t,g, or c
  misc_feature (1960): n equals a,t,g, or c
cagtacngtccgantcccgggtcgacccacgcgtccgatggcggcggaggaacctcagcagcagaagcaggagccgctgggcagcgactccgaagtgttaactgtctggcctatgatgaagccatcatggctcagcaggaccgaattcagcaagagattgctgtgcagaaccctctggtgtcagagcggctggagctctcggtcctatacaaggagtatgctgaagatgacaacatctatcaacagaagatcaaggacctccacaaaaagtactcgtacatccgcaagaccaggcctgacggcaactgtttctatcgggctttcggattctcccacttggaggcactgctggatgacagcaaggagttgcagcggtgagaagggtgggcactgggcaccgaggcaggtgggtgtytacctcctccccgggcgagtaggatgtgtctcgagtagggtgtctycctccttcccgggcgatgggctggactctggccttgccargcggggcagtgctgtntcggccctggcgtctgggctggtcgaggagcccatgctgggcccgcctttccatcccacccccaggttcaaggctgtgtctgccaagagcaaggaagacctggtgtcccagggcttcactgaattcacaattgaggatttccacaacacgttcatggacctgattgagcaggtggagaagcagacctctgtcgccgacctgctggcctccttcaatgaccagagcacctccgactaccttgtggtctacctgcggctgctcacctcgggctacctgcagcgcgagagcaagttcttcgagcacttcatcgagggtggacggactgtcaaggagttctgccagcaggaggtggagcccatgtgcaaggagagcgaccacatccacatcattgcgctggcccaggccctcagcgtgtccatccaggtggagtacatggaccgcggcgagggcggcaccaccaatccgcacatcttccctgagggctccgagcccaaggtctaccttctctaccggcctggacactacgatatcctctacaaatagggctggctccagcccgctgctgccctgctgcccccctctgccaggcgctagacatgtacagaggtttttctgtggttgtaaatggtcctatttcacccccttcttcctgtcacatgacccccccccatgttttattaaagggggtgctggtggtgagccgtgtgtgcgtgtccctgctctgctgcccgcctggctgctctgtctgctgccccctccccccaggtgggtccccctgcttttcacctatctactcctgagcttccccaacaggagcaggtttgaggggccaggcctcttggaggcccctcctgcttcgttgggttctgcttccttcccttcttagctggctcaggggcttctatgggatcctggaagttccttagggacttgcccagggtcccagggccacccacacttcatctgctccctcataggccccacctccacgtcccggctgggccccagaccccagcttcctgccctccaccgggagtctgcatggttgggagtcctgggtggaggggcctttgtgaggctggacccggctcagggcaggtggaggagctgggcctcccacagggtgcccgggcagtgccatcctggtgggggagggcagccttcaaacgtgtggggtctamagtcctcaggtctaggcagggctgccggttctccacctccccatccgccccaggccccctgcctgtgcctgccttgcaccccctctgcttgggccacggtgtctctgcattgcctgcctttttgccttcacctcttttcttccccgccccctgcacattcgggktctcagcccccaggctgtgagctccttggggcaggccctcaataaatgtgaaactgctgctgcaaaaaaaaaaaaaaaaaaaaaagggggccgcttanagatcctcaagggccaagtacggtgat

SEQ ID NO: 126 - DNA, 1451 bp, Homo sapiens
ggtcgacccacgcgtccgagatggcggagcgcgggtacagcttttcgctgactacattcagcccgtctggtaaacttgtccagattgaatatgctttggctgctgtagctggaggagccccgtccgtgggaattaaagctgcaaatggtgtggtattagcaactgagaaaaaacagaaatccattctgtatgatgagcgaagtgtacacaaagtagaaccaattaccaagcatataggtttggtgtacagtggcatgggccccgattacagagtgcttgtgcacagagctcgaaaactagctcaacaatactatcttgtgtaccaagaacccattcctacagctcagctggtacagagagtagcttctgtgatgcaagaatatactcagtcaggtggtgttcgtccatttggagtttctttacttatttgtggttggaatgagggacgaccatatttatttcagtcagatccatctggagcttactttgcctggaaagctacagcaatgggaaagaactatgtgaatgggaagactttccttgagaaaagatataatgaagatctggaacttgaagatgccattcatacagccatcttaaccctaaaggaaagctttgaagggcaaatgacagaggataacatagaagttggaatctgcaatgaagctggatttaggaggcttactccaactgaagttaaggattacttggctgccatagcataacaatgaagtgactgaaaaatccagaatttcagataatctatctacttaaacatgtttaaagtatgttttgttttgcagactttttgcatacttatttctacatggtttaaatcgactgtttttaaaatgacacttataaatcctaataaactgttaaacccaccttccagccttttaggagttgctaaaattttaacagttatttccygctttttatcacagttgatttctgaagactayattgccaagcagaatgatgaaatgactttttcgttgtcaggcaattttggttaagtcaaatcttaatgccctcttcgctatcagatgttgcctgtgtttccataaagcaaaatgctgattttggtaaaaaacatgactgcttctagagctgggaggatctgcagactttcacggattcatggaacaagaaaagaagcataggtacttttaggtgccattaggtattgatcagtgaaatcctagggtgctctatgagattgtactaggcctatgaagagtggtaagccaaataggtctccatgggagatacattatgtaaataaataaacaatggtttgctggttcctgttggtgtctccacaagtaggtaaacatgtttaaaggaacccgggttcttagattttgttagactttttaaactcaaggatgagcataagtgcttgaaataaaatgctaatacttaagtgtcaaaaaaaaaaaaaaaaa

SEQ ID NO: 127 - DNA, 1234 bp, Homo sapiens
  misc_feature (857): n equals a,t,g, or c
  misc_feature (1204): n equals a,t,g, or c
  misc_feature (1226): n equals a,t,g, or c
aggttcccagctagccagtaaattctttaaagacaagcattgtaccctttgcctcagtgtgcccagcaccaacctggcacatgctctattcatgttttccatgagtgtttcatgttagaggtgtattttgtacacaggttttatgctgggggctcagagagaagtggacagcagattgttggccctcccaggaagaaaagtcccaacgagctggtgggatgatctctttaaaggtgccaaagagcatggagctgtagctgtggagcgagtgaccaagagccctggagagaccagtaaaccgagaccatttgcaggaggtggctaccgccttggggcagcaccagaggaagagtctgcctatgtggcaggagaaaagaggcagcattccagccaagatgttcatgtagtattgaaactctggaagagtggattcagcctggataatggagaactcagaagctaccaagacccatccaatgcccagtttctggagtctatccgcagaggggaggtgccagcagagcttcggaggctagctcacggtggacaggtgaacttggatatggaggaccatcgggacgaggactttgtgaagcccaaaggagccttcaaagccttcactggcgagggtcagaaactgggcagcactgcccccaggtgttgagtaccagctctccagcccaacaggcagaaaatgaagccaaagccagctcttccatcttaatcgacgaatcagagcctaccacaaacatccaaattcggcttgcagacggcgggaggctggtgcagaaatttaaccacagccacaggatcagcgacatccgactcttcatcgtggatgcccggccagccatggntgccaccagctttatcctcatgactactttcccgaacaaagagctggctgatgagagccagaccctgaaggaagccaacctgctcaatgctgtcatcgtgcagcggttaacataaccgcccagccagctgcctggcctccctcctgtgtttcccatggccagtggccatgccccatggggatcgcccctcctgcccccttgtgcacacccagcagtccagtgcaacgtctcctccatagctctgggttcttagatcttggttggacgtttgttttctccttagttgcatttcctgggtttttgtgatgatcaatggactttaatgaaaaaaaaaataaaaacaaccnaaaggggggcccggtcccaatncccccctt

SEQ ID NO: 128 - DNA, 863 bp, Homo sapiens
  misc_feature (840): n equals a,t,g, or c
cccacgcgtccgcaggcgcgctcgggctgccgctggctcttcgcacgcggccatggccgactccgagctgcagctggttgagcagcggatccgcagcttccccgacttccccaccccaggcgtggtattcagggacatctcgcccgtcctgaaggaccccgcctccttccgcgccgccatcggcctcctggcgcgacacctgaaggcgacccacgggggccgcatcgactacatcgcaggcctagactcccgaggcttcctctttggcccctccctggcccaggagcttggactgggctgcgtgctcatccgaaagcgggggaagctgccaggccccactctgtgggcctcctattccctggagtacgggaaggctgagctggagattcagaaagacgccctggagccaggacagagggtggtcgtcgtggatgatctgctggccactggtggaaccatgaacgctgcctgtgagctgctgggccgcctgcargctgaggtcctggagtgcgtgagcctggtggagctgacctcgcttaagggcagggagaagctggcacctgtacccttcttctctctcctgcagtatgagtgaccacagggcctcccagcccaacatctccagctggatcccagggaaatatcagccttgggcaactgcagtgaccaggggcaccggctgcccacagggaacacattcctttgctggggttcagcgcctctcctggggctggaagtgccaaagcctggggcaaagctgtgtttcagccacactgaacccaattacacacagcgggagaacgcagtaaacagctttcccacaaaaaaaaaaaaaaaaanaaaaaaaaaaaaaaagggcggcc

SEQ ID NO: 129 - DNA, 1238 bp, Homo sapiens
cacagtgtctgctgtgattgagatgcgcacaggttgggggaggtagggccttacgcttgtcctcagtgggggcagtttgccttagatgacarctgggctcttcttcacaccacctgcagcccctccctgcccctgccctagctgctgtgtgttcagttgccttctttctacctcagccggcgtggagtggtctctgtgcagttagtgccaccccacacacccgtctcttgattgagatgtttctggtggttatgggtttcccgtggagctkggggtgggcgccgtgtacctaagctggaggctggcgctctccctcagcacaggtgggtcagtggccagcaggcccatctggagtgggagtgggcacttccaccccgcccacaggccatccggctgtgcaggccagcccctaggagcargtcccgggtgactggcagttttcacggtctagggccgagacgatggcatggggcctagagcatgaggtagagcagaatgcagaccacgccgctggatgccgagagaccctgctctccgagggaggcatctgtgtcatgctgtgagggctgaggacggggccctagtctctggttttctggtcttaacatccttatctgtgtccgccacggaggtgactgagctgctagcgagttgtcctgtcccaggtacttgagttttggaaaagctgactcacgcccatccatctcacagcccttccctggggacagtcgcttccgccttgacacctcactctcagttgaataactcaagcttggtcatcttcagactcgaattcttgagtagacccagacggcttagcccaagtctagttgcagctgcctcggcaagtccccatttgctcaggcagccctgaatgggcctgtttacaggaatggtaaattgggattggaaggaatatagcttccagcttcataggctagggtgaccacggcttaggaaacagggaaagaaagcaaggcccttttcctgcctttcccgggatctgtctactccacctccacgggggaggccagtggggaagggctgtcacctcttccccatctgcatgagttctggaactctgtcctgttggctgcttgcttccagctccccccaatctccatcgcagcgggttcctcctgtcttttctacagtgtcataaaacatcctgcccctaccctctcccaaaggtcaattttaattctyawcaagaagatttatgaggagaagaaaaagaa

SEQ ID NO: 130 - DNA, 379 bp, Homo sapiens
  misc_feature (373): n equals a,t,g, or c
tggtttgggagctgccaggctcctgggaggatcgcagtcagcagagcagggctgaggcctgggggtaggagcagagcctgcscatctggaggcagcatgtccaagaaagggagtggaggtgcagcraaggacccaggggcagagccacgctggggatggaccccttcgaggacacgctgcggyggctgcgtgaggccttcaactgakggcgcacgcggccggccgagttccgggctgcgcactccagggcctgggccacttccttcaagaaaacaagcarcttctrcgmgacgtgctggcccaggaactgcataagccagctttcgaaggcagacatatctgagtcatcctttgccagaacgaggttgaatangctctt

SEQ ID NO: 131 - DNA, 1786 bp, Homo sapiens
cctgggcgctaagatggcggcggcgtgagttgcatgttgtgtgaggatcccggggccgccgcgtcgctcgggccccgccatggccgtcaccatcacgctcaaaacgctgcagcagcagaccttcaagatccgcatggagcctgacgagacggtgaaggtgctaaaggagaagatagaagctgagaagggtcgtgatgccttccccgtggctggacagaaactcatctatgccggcaagatcttgagtgacgatgtccctatcagggactatcgcatcgatgagaagaactttgtggtcgtcatggtgaccaagaccaaagccggccagggtacctcagcacccccagaggcctcacccacagctgccccagagtcctctacatccttcccgcctgcccccacctcaggcatgtcccatcccccacctgccgccagagaggacaagagcccatcagaggaatccgcccccacgacgtccccagagtctgtgtcaggctctgttccctcttcaggtagcagcgggcgagaggaagacgcggcctccacgctagtgacgggctctgagtatgagacgatgctgacggagatcatgtccatgggctatgagcgagagcgggtcgtggccgccctgagagccagctacaacaacccccaccgagccgtggagtatctgctcacgggaattcctgggagccccgagccggaacacggttctgtccaggagagccaggtatcggagcagccggccacggaagcaggagagaaccccctggagttcctgcgggaccagccccagttccagaacatgcggcaggtgattcagcagaaccctgcgctgctgcccgccctgctccagcagctgggccaggagaaccctcagcttttacagcaaatcagccggcaccaggagcagttcatccagatgctgaacgagccccctggggagctggcggacatctcagatgtggagggggaggtgggcgccataggagaggaggccccgcagatgaactacatccaggtgacgccgcaggagaaagaagctatagagaggttgaaggccctgggcttcccagagagcctggtcatccaggcctatttcgcgtgtgaaaaaaatgagaacttggctgccaacttcctcctgagtcagaactttgatgacgagtgatgccaggaagccaggccaccgaagcccccaccctacccttattccatgaaagttttataaaagaaaaaatatatatatattcatgtttatttaagaaatggaaaaaaaaatcaaaaatcttaaaaaaacaagcaaacagtccagcttcctgtcctcctaaagtggcccctgttcccatctcccgggccagacagctgtccccccgtcctcctccccagcccagcctgctcagagaagctggcaggactgggaggcgacagatgggcccctcttggcctctgtcccagctctctgcagccagacggaaaggcggctgcttgcctctccatcctccgaaaaacccctgaggacccccccccatcctcttctaggatgaggggaagctggagccccaactttgatcctccattggagtggcccaaatctttccatctagggcaagtcctgaaagcccaaggccccctccccagtctggccttgcctccagcctggagaagggctaacatcagctcattgtcaaggccacccccaccccagaacagaaccgtgtctctgataaaggttttgaagtgaataaagttttaaaaactaaaaaaaaaaaaaaaaaaaaaaaaaaaa

SEQ ID NO: 132 - DNA, 974 bp, Homo sapiens
  misc_feature (165): n equals a,t,g, or c
  misc_feature (853): n equals a,t,g, or c
  misc_feature (963): n equals a,t,g, or c
ggcagctaacctcctcatccccgctgtgggttctagcctctctgaagccctggacttgatcgagtcggaccctgatgcttggtgtgacctgagtaaatttgacctccctgaggaaccatctgcagaggacagtatcaacaacagcctagtgcagctgcaagcgtncacatcagcagcaagtcctgccaccccgccagccttccgccctggtgcccagtgtgaccgagtaccgcctggatggccacaccatctcagacctgagccggagcagccggggcgagctgatccccatctcccccagcactgaagtcgggggctctggcattggcacaccgccctctgtgctcaagcggcagaggaagaggcgtgtggctctgtcccctgtcactgagaatagcaccagtctgtccttcctggattcctgtaacagcctcacgcccaagagcacacctgttaagaccctgcccttctcgccctcccagtttctgaacttctggaacaaacaggacacattggagctggagagcccctcgctgacatccaccccagtgtgcagccagaaggtggtggtcaccacaccactgcaccgggacaagacacccctgcaccagaaacatgctgcgtttgtaaccccagatcagaagtactccatggacaacactccccacacgccaaccccgttcaagaacgccctggagaagtacggacccctgaagcccctgccacagaccccgcacctggaggaggacttgaaggaggtgctgcgttctgaggctggcatcgaactcatcatcgaggacgacatcaggcccgagaagcagaagaggaagcctgggctgcggcggagcccatncaagaaagtccggaagtctctggctcttgacattgtggatgaggatgtgaagytgatgatgtccacaytgcccaaktytttatccttggcgacaaytgccccttgcaaanttttccagcct

SEQ ID NO: 133 - DNA, 634 bp, Homo sapiens
attcggcacgacgggtgaacctggccacagctcaccctggaacagccacaatgtctgccccttagagaagaaccctgaaatcagaccagtttttgcggcctccccctttcctctctgttacagtgccctttccaggccttaagagaagtaaaacttagctgcagcgtcaggaggtggaccccagagtgtgagtggcacgcttctctgtgaacccgtcctcaccatgtttgccacatctggggcagtggcagcggggaagccttactcgtgcagcgaatgtggcaagagcttctgctacagctcagtgctgctgcgacatgaacgagctcacggcggtgacggccgcttccgttgcctagaatgcggtgagcgctgtgcacgggctgctgacctccgagcgcacaggcgcacgcatgctggccagaccctctacatctgcagtgagtgcggacaaagcttccgccacagcggccgtcttgacctacacttgggcgcacaccggcagcgatgccgcacttgcccctgccgcacwtgcggccggcgcttcccgcacctcccggcgctgctgctacaccggcgccgccagcatctgccagagcggccccgscgytgcccgctgtgcgycctcaggttt

SEQ ID NO: 134 - DNA, 1855 bp, Homo sapiens
  misc_feature (1818): n equals a,t,g, or c
  misc_feature (1845): n equals a,t,g, or c
gcccacgcgtccggcggcgcgcccgagggcgccgcgtgcggcctgcaggagggcccgtgcggcgaggggctgcagtgcgtggtgcccttcggggtgccagcctcggccacggtgcggcggcgcgcgcaggccggcctctgtgtgtgcgccacagcgagccggtgtgcggcagcgacgccaacacctacgccaacctgtgccagctgcgcgccgccagccgccgctccgagaggctgcaccggccgccggtcatcgtcctgcagcgcggagcctgcggccaagggcaggaagatcccaacagtttgcgccataaatataactttatcgcggacgtggtggagaagatcgcccctgccgtggttcatatcgaattgtttcgcaagcttccgttttctaaacgagaggtgccggtggctagtgggtctgggtttattgtgtcggaagatggactgatcgtgacaaatgcccacgtggtgaccaacaagcaccgggtcaaagttgagctgaagaacggtgccacttacgaagccaaaatcaaggatgtggatgagaaagcagacatcgcactcatcaaaattgaccaccagggcaagctgcctgtcctgctgcttggccgctcctcagagctgcggccgggagagttcgtggtcgccatcggaagcccgttttcccttcaaaacacagtcaccaccgggatcgtgagcaccacccagcgaggcggcaaagagctggggctccgcaactcagacatggactacatccagaccgacgccatcatcaactatggaaactcgggaggcccgttagtaaacctggacggtgaagtgattggaattaacactttgaaagtgacagctggaatctcctttgcaatcccatctgataagattaaaaagttcctcacggagtcccatgaccgacaggccaaaggaaaagccatcaccaagaagaagtatattggtatccgaatgatgtcactcacgtccagcaaagccaaagagctgaaggaccggcaccgggacttcccagacgtgatctcaggagcgtatataattgaagtaattcctgataccccagcagaagctggtggtctcaaggaaaacgacgtcataatcagcatcaatggacagtccgtggtctccgccaatgatgtcagcgacgtcattaaaagggaaagcaccctgaacatggtggtccgcagggtaatgaagatatcatgatcacagtgattcccgaagaaattgacccataggcagaggcatgagctggacttcatgtttccctcaaagactctcccgtggatgacggatgaggactctgggctgctggaataggacactcaagacttttgactgccattttgtttgttcagtggagactccctggccaacagaatccttcttgatagtttgcaggcaaaacaaatgtaatgttgcagatccgcaggcagaagctctgcccttctgtatcctatgtatgcagtgtgctttttcttgccagcttgggccattcttgcttagacagtcagcatttgtctcctcctttaactgagtcatcatcttagtccaactaatgcagtcgatacaatgcgtagatagaagaagccccacgggagccaggatgggactggtcgtgtttgtgcttttctccaagtcagcacccaaaggtcaatgcacagagaccccgggtgggtgagcgctggcttctcaaacggccgaagttgcctcttttaggaatctctttggaattgggagcacgatgactctgagtttgagctattaaagtacttcttacacattgaaaaaaaaaaaaaaaaanctcgggggggggcccggtacccaattngccctttaag

SEQ ID NO: 135 - DNA, 917 bp, Homo sapiens
  misc_feature (913): n equals a,t,g, or c
ggttttttgcgcgtgcatatggcggtggcgggtggggggaagggggagatcctgctgcactggccgcccaagttggggggcgagctcggtggtgacgcgcggccctcacgtgacccaragctgcagagcgacgcagccttcggtgcagtcgtcactcgcgtctggctaccagctccccgctgccctgagctcggcgggctggcattcggcccggggaaaagcggagcaggtctgcgaggctaagtgtctccgcggcgcacctcgcggcgagaatccggaggagaaggagactgcaaggataggcccaggaaaacgaagagatggagcagcctatgcagaatggagaggaagaccgccctttgggaggaggtgaaggccaccagcctgcaggaaatcgacggggacaggctcgccgacttgcccctaattttcgatgggccatacccaataggcagatcaatgatgggatgggtggagatggagatgatatggaaatattcatggaggagatgagagaaatcagaagaaaacttagggagctgcagttgaggaattgtctgcgtatccttatgggggagctctctaatcaccatgaccatcatgatgaattttgccttatgccttgactcctgccatttatcatgagattaatactgtgattcccgctgttttctttttccttgcattttcctaatatgcctttactgatccgtttgctgtgaaccctatgttatttccatgtgtcaagtgggtcttgtgttgccagcttctatttgaagattgcctttgcactcagtgtaagtttctgtcagcagtagtttcacccatttgcatggaaaaatttaaagctaataaagcaatttaaaaagcaaaaaaaaaaaaaaaaaaaaaaaaaamamgggggggcccggwnccca

SEQ ID NO: 136 - DNA, 1271 bp, Homo sapiens
  misc_feature (1236): n equals a,t,g, or c
  misc_feature (1255): n equals a,t,g, or c
gcaaggcttcccctctaccctctctgggcctctcacaaacgctgagccccgccccgctgaggcctgtctgcagaatccacascaaccagcaccatgcccatgayactggggtactggracatccgcgggctggcccaykccatccgcctgctcctggaatacacagactcaagctaygaggaaaagaagtacacgatgggggacgctcctgattatgacagaagccagtggctgaatgaaaaattcaagctgggcctggactttcccaatctgccctacttgattgatgggrctcacaagatcacccagagcaacgccatcctgcggtacattgcccgcaagcacaacctgtgcggggaatcagaaaaggagcagattcgcgaagacattttggagaaccagtttatggacagccgtatgcagctggccaaactctgctatgacccagattttgagaaactgaaaccagaatacctgcaggcactccctgaaatgctgaagctctactcacagtttctggggaagcagccatggtttcttggggacaagatcacctttgtggatttcatcgcttatgatgtccttgagagaaaccaagtatttgagcccagctgcctggatgccttcccaaacctgaaggacttcatctcccgatttgagggcttggagaagatctctgcctacatgaagtccagccgcttcctcccaagacctgtgttcacaaagatggctgtctggggcaacaagtagggccttgaaggccaggaggtgggagtgaggagcccatactcagcctgctgcccaggctgtgcagcgcagctggactctgcatcccagcacctgcctcctcgttcctttctcctgtttattcccatctttactcccaagacttcattgtccctcttcactccccctaaacccctgtcccatgcaggccctttgaagcctcagctacccactatccttcgtgaacatcccctcccatcattacccttccctgcactaaagccagcctgaccttccttcctgttagtggttgtgtctgctttaaargcctgcctggcccctcgcctgtggagctcagccccgagctgtccccgtgttgcatgaaggagcagcattgactggtttacaggccctgctcctgcagcatggtccctgccttaggcctacctgatggaagtaaagcctcaaccacaaaaaaaaaaaaaaaaaatttgggggggggcccgttancccatttggccctttaggngggggggttttaaatt

SEQ ID NO: 137 - DNA, 2017 bp, Homo sapiens
  misc_feature (295): n equals a,t,g, or c
ggaatgtcatcagtgttgacccgaatgatcagaaaaagacagcttgttatgacattgatgttgaagtggatgacaccttgaagacccagatgaattcttttctgctgtccactgccagccaacaggagattgctactctagacaacaagacaatgactgatgtggtgggtaaccarargargagcgccgagctgagttctacttccagccctgggkcaggaggctgtgtgccratacttctactccaaggtgcagcagagacgacaagaattagagcaagccctgggaatccggnatacatagggcctctcccacagccctgattcgactgcaccaattcttgawttgggccctgtgctgcctgcctcatagtatctgccttggtcttgcttggggcgttccaggggatgctgttggttcaaggacaacaccagaatgaagagggtctcacaagacacctgttatcctcttctttcaccctatctcttcccacccccagcttccctttgccccacaaagttcccatgtgcctgtaccctcccctggtctacataggacctctagatagtgttagagagagaacatgtagtggtaatgagtgcttggaatggattgggcctcaggccaggtggtcttcaaggggaccagctaactgatcctgcccttcagagacccaggagttgggagctttcgctccttctccaagactcaggcctgtgggcactctataagctagttgatcttggctctcctgataacagaatccaatttccttccttccctccacaggtttggaacaaactctcccttcacttgttgccctgtagcactacagaaaccctggttcttgggctccactggccccagggtcagtccccagccctctgggttgrcctgctgtcagtgcttctytcactccttagttggggtccacatcagtattggagttttgttctttattgctccctcccagacactccctgtggctgccctttgtgattccctcagatctgccctaatcccgggcatttgggtgggggaatcttgcctttccctttcagagccccagggatctcatctggggaactgtcattgccagcagaggctgttccttcctgctgtttggagatgtgactcattcattcactcactccaccctgcctctgcatcccttaatggagaaacgggcctaaaaccaaacgggtaaaaagccctgggccatccctgtcttcctgtcccttgtctgcccagttgacacctactggtgacttctagggcactgaggagtgaaagcgcctagggctggagaatagcgctgagttgggtttgtgactcttccctctccctgcctcacaggattgtgactccccagcccctgccctcaaagcttcagacccctcaggtagcagcaggaccttgtgatcttggccccttggatctgagatggtttttgcatctttccaggagagcctcacattcttcttccaggttgtatcacccccgagttagcatatcccaggctcgcagactcaacacagcaagggtgggagacagctgggcacaaagggggaattccgttcagcatgggctctaaacccacagaactgacaaagcccctgcttccccaccccctcctcaggctcctgcgagcacacccccacccccaaatccctccctgttctacactggggacagcagaattttctccccgtcttccccttcctgccattttccctcccttgaaaggttgacactggacaaccttggggcagctgagccctggccgcctcctggctggaaccatgagaaggaagctcagtacttcccacagtgtccctgttgataactgtttttattaactgaattgtttttttcatggaccaaacttttttttgtactgtccccttattgatgttacccagttttaataaaagaatcttctgaaggatgggtcctcctacctactgtgagagagctcttccctgagctcttcttccttcaataccattaaaaaaaa

SEQ ID NO: 138 - DNA, 937 bp, Homo sapiens
gattcaaacaggcaacaatgaccttttattttctgtttgtccccacctccccagccttccacctcctgttcttcctaccttcttcctttttgactaaataatccccacctcccttgatcatacagtgaggctacagtgactgaggggagaatccctcctgttcactctcccaaccctgctccagcccctcagcttcccagaccctcatgcagttggttgtaaattctcccaggagctgttttactgtctacttttcaggattaaaaaaaaaatcaaaacttaaaaaaaaaaaagtttaaaaagcaaaatggggagggggaggaagcagtgacttttttttggtaattatgcgcttttttttaatttttagaatttgtctttttactgtgggtgggctgttgatatttcatcaagataagcatttctttcctgagttcaggtgactgaggaagagccacaaaacaaaacacaacaaaaccaaaccacagaatcatctttaacccaactttttatacgatgccccagttccccataactttgcacacaagcttctgtgttcagttgaattgtaactgctttttgtatttggagagagtgactattgaacttgaaaccttttattccgggcgtcttggtagtttctggtgggattcagtgggtgagagggaagaaggggaggttggggggctccttcccttcagaacttgaagtttctcccactgcctcctctccagtggtctcccaggtgccagacccaaaagcttttcctacagtgataccctttatttttacttccccttgactcatatgttttaacatgattttaacaaactgcacttattaagaaatgtgtttgccctgttttgtttggtttcgttttgttttctttgaataaatgacatggcacctcctagcaggaaggaaaaaaaaaaaaaaa

SEQ ID NO: 139 - DNA, 2759 bp, Homo sapiens
  misc_feature (171): n equals a,t,g, or c
  misc_feature (1654): n equals a,t,g, or c
  misc_feature (2743): n equals a,t,g, or c
  misc_feature (2744): n equals a,t,g, or c
  misc_feature (2746): n equals a,t,g, or c
gctagtctcacaggaacccaggcgttgcccccactcttctccctcggctaccaccagagccgttggaactaccgggacgaggctgatgtgctggaagtggatcagggctttgatgatcacaacctgccctgtgatgtcatctggctagacattgaacatgctgatggcaancggtatttcacctgggaccccagtcgcttccctcagcccygcaccatgcttgascgcttggcttctaagaggcsraagctggtggccatcgtagacccccacatcaaggtggactccggctaccgagttcacgaggagctgcggaacctggggctgtatgtwaaaacccgggatggctctractatragggctggtgctggccaggctcagctggttaccctgacttcactaatcccacgatgagggcctggtgggctaacatgttcagctatgacaattatgagggctcagctcccaacctctttgtctggaatgacatgaacgaaccatctgtgttcaatggtcctgaggtcaccatgctcaaggatgcccagcattatgggggctgggagcaccgggatgtgcataacatctatggcctttatgtgcacatggcgactgctgatgggctgagacagcgctctgggggcatggaacgcccctttgtcctggccagggccttcttcgctggctcccagcgctttggagccgtgtggacaggggacaacactgccgagtgggaccatttgaagatctctattcctatgtgtctcagcttggggctggtgggactttccttctgtggggcggatgtgggtggcttcttcaaaaacccagagccagagctgcttgtgcgctggtaccagatgggtgcttaccagccattcttccgggcacatgcccacttggacactgggcgacgagagccatggctgttaccatctcagcacaatgatataatccgagatgccttgggccagcgatattctttgctgcccttctggtacaccctcttatatcaggcccatcgggaaggcattcctgtcatgaggcccctgtgggtgcagtaccctcaggatgtgactaccttcaatatagatgatcagtacttgcttggggatgcgttgctggttcaccctgtatcagactctggagcccatggtgtccaggtctatctgcctggccaaggggaggtgtggtatgacattcaaagctaccagaagcatcatggtccccagaccctgtacctgcctgtaactctaagcagtatccctgtgttccagcgtggagggacaatcgtgcctcgatggatgcgagtgcggcggtcttcagaatgtatgaaggatgaccccatcactctctttgttgcacttagccctcagggtacagctcaaggagagctctttctggatgatgggcacacgttcaactatcagactcgccaagagttcctgctgcgtcgattctcattctctggcaacacccttgtctccagctcagcagaccctgaaggacactttgagacaccaatctggattgagcgggtggtgataataggggctggaaagccagcagctgtggtactccagacaaaaggatctccagaaagccgcctgtccttccagcatgaccctgagacctctgtgttggtcctgcgcaagnctggcatcaatgtggcatctgattggagtattcacctgcgataacccaagggatgttctgggttagggggagggaaggggagcattagtgctgagagatattctttcttctgccttggagttcggccctccccagacttcacttatgctagtctaagacccagattctgccaacatttgggcaggatgagagggctgaccctgggctccaaattcctcttgtgatctcctcacctctcccactccattgataccaactctttcccttcattcccccaacatcctgttgctctaactggagcacattcacttacgaacaccaggaaaccacagggcccttgtcgccccttctctttcccttatttaggagccctgaactcccccagagtctatccattcatgcctcttgtatgttgatgccacttcttggaagaagatgagggcaatgagttagggctccttttccccttccctcccaccagattgctctcccacctttcatttcttcctccaggctttactcccctttttatgccccaccgatacactgggaccaccccttaccccggacaggatgaatggatcaaaggagtgaggttgctaaagaacatccttttccctctcattctacccttttcctctccccgattccttgtagagctgctgcaattcttagaggggcagttctacctcctctgtccctcggcagaaagacgtttccacacctcttaggggatgcgcattaaacttcttttgcccccttcttgtcccctttgaggggcacttaagatggagaaatcagttgtggtttcagtgaatcatggtcacctgtatttattgctaggagaagcctgagggtggggggagatgatcatgtgtgctcggggttggctggaagccctgggtggggggttgggggaggactaatggggagtcggggaatatttgtgggtattttttttacttcctcttggttcccagctgtgacacgttttgatcaaaggagaaacaataaagggataaaccataaaaaaaaaaaaaaaaaaaaaaaaaaaaaaaaaaaaaaaaaaaaaaaaaaaaaaaaaaaaannanaaaaaaaaataaa

SEQ ID NO: 140 - DNA, 1241 bp, Homo sapiens
  misc_feature (317): n equals a,t,g, or c
tcgacccacgcgtccgggagaacgggcggagggcgcgggccgaccgggcgcaccgaccatggcctccaaatgccccaagtgcgacaagaccgtgtacttcgccgagaaggtgagctccctggggaaggactggcacaagttctgcctcaagtgcgagcgctgcagcaagacgctgacgcccgggggccacgccgagcatgacgggaagccgttctgccacaagccgtgctacgccaccctgttcggacccaaaggcgtgaacatcgggggcgcgggctcctacatctacgagaagcccctggcggaggggccgcagntcaccggccccatcgaggtccccgcggcccgagcagaggagcggaaggcgagcggccccccgaaggscccagcagagcctccagtgtcaccactttcaccggggagcccaacacgtgcccgcgctgcagcaagaaggtgtacttcgctgagaaggtgacgtctctgggcaaggattggcaccggccctgcctgcgctgcgagcgctgcgggaagacactgacccccggcgggcacgcggagcacgacggccagccctactgccacaagccctgctatggaatcctcttcggacccaagggagtgaacaccggtgcggtgggcagctacatctatgaccgggaccccgaaggcaaggtccagccctaggctacagcggctctcatgatgtgggctcacctgcgccccagaccctgcaggggcccccctgcttggctctgctgggagagtgctcagccgcccagtcctgcctgcaagcccagggcgagtattggaggaggggcagccacgggcagagcaccatgcccatccccgagtctctggtgtgtctgccccctctggcatcctctgggcgtcccatgatcccttctgtgtctgcgtgtccgaatccccgtgtgaccctgtcccagcattttcccgccgaccctgcgtgtccccgtggcgctgtccgctctccctctcctgctgcccacccacctgccagtgttatttatgctcccttcgtgggtgatggccacgccctcaccatgtccctggcagagggcttcctccgggatcccctgcctggtgcccacactgcctcgcaagcgctcgccaccctcacgtggctcacctgctgttgagccttgtgctgtcaataaacggtttgaggattgcaaaaaaaaaaaaaaaaaaaaaaaaaaaaaaaaaaaaaaaaaaaaaaaaag

SEQ ID NO: 141 - DNA, 3405 bp, Homo sapiens
  misc_feature (1569): n equals a,t,g, or c
cctttccgatacgtcctagacccacctgcccgccggatctggaataatgtgactcgctggtttgtcacgtgtgtccggcagccagaattccgagccgtgctaggagaagtggttctatactcaggagccaggcctctctctcatcagccaggccccgaggctcctgccctcccaaagacagctgctcagctcaagaaagaggcaaagaaacgggagaagctagagaaattccaacagaagcagaagatccaacagcagcagccacctycaggggagaagaaaccaaaaccagagaagagggagaaacgggrtyctggggtcattamctwtgacytcccaaccccamccggggaaaagaaagatgtcagtggccccatgcccgactcctacagccctcggtatgtggaggctgcctggtacccttggtgggagcagcagggcttcttcaagccagagtatgggcgtcctaatgtgtcagcagcaaatccccgaggtgtcttcatgatgtgcatcccaccccccaatgtracaggctccctgcacctgggmcatgcactcaccaacgccatccaggactccctgactcgatggcaccgcatgcgtggggagaccaccctgtggaaccctggctgtgaccatgcaggtattgccacccaggtggtggtggagaagaagctatggcgtgagmagggactgagccggcaccagctgggccgcgaggctttctacaggaagtctggaagtggaaggaggagaaaggtgaccggatttaccaccagttgaagaagcttggcagctccttggactgggatcgagcctgtttcaccatggaccctaaactctcagcagctgtgacagaggcctttgtccggcttcacgaggaaggcatcatctatcgcagtacccgccttgttaactggtcctgcaccctcaactccgccatctctgacattgaggtggataagaaggagctgacaggtcgcaccctgctctccgtgcctggctacaaggagaaggtggagttcggggtcctcgtgtcctttgcctataaggtccaaggctcagatagcgacgaggaggtggtggtggcaacaactcggatcgagacaatgctgggagatgtggctgtagctgtgcaccccaaagataccagataccagcacctgaaggggaagaacgtgatccacccattcctgtctcggagccttcccattgtcttcgatgaatttgtggacatggactttggcacaggtgctgtgaagatcacccccgcacatgaccaaaatgactatgaagttgggcagcggcacgggctggaggccatcagcatcatggactcccggggggccctcatcaatgtgcctccgcctttyctgggcctgcccaggtttgaggccaggaaagcggtgctggtggcgctgaaggagcggggactgttccgtggcattgaggacaaccccatggtggtgccactttgcaaccggtcgaaggacgtggtagagcctctgctgcggycgcatgggtacgttcgctgcggggagatggcccaggctgccagcgccgctgtgnactcggggtgacctccgcatcctgcctgaggcccatcagcgcacatggyatgcctggatggacaacatccgggagtggtgcatttccaggcagctktggtggggccatsgcatcccagcctactttgtmactgtmagtacccagcggtgccccctggggaggaccctgaatgggcggtactgggtgagtggacgcaatgaggcggaggcccgggagaaggcagccaaggagttcggagtgtcccctggacaagatcagtctccagcaagatgaggatgtattggatacctggttctcctctggcctcttccccttatccattttgggctggccaaccagtcagaagacctgagtgtgttctaccccgggacactgctggagaccggtcatgacatcctcttcttctgggtggcccggatggtcatgctgggcctgaagctcacgggcaggctgccytttagagaggtctacctccatgccatcgtgcgagatgctcacggccggaagatgagcaagtctctaggcaatgtcatcgatcccctggacgtcatctatggaatctccctgcagggcctccacaaccagctgctgaacagcaacctggatcccagcgaggtggagaaggccaaagaagggcagaaagctgacttcccagcggggattcctgaatgtggcaccgatgctctccggtttggattatgtgcctacatgtcccagggtcgtgacatcaacctggatgtgaaccggatactgggttaccgccacttctgcaacaagctctggaatgccaccaagtttgcccttcgtggccttgggaagggttttgtgccctcacccacctcccagcccggaggccatgagagcctggtggaccgctggatccgcagccgcctgacagaggctgtgaggctcagcaatcaaggcttccaggcctacgacttcccggccgtcaccactgcccagtacagcttctggctctatgagctctgtgatgtctacttggagtgcctgaaacctgtactgaatggggtggaccaggtggcagctgagtgtgcccgccagaccctgtacacttgcctggacgttggcctgcggctgctctcacccttcatgcccttcgtgacggaggagctgttccagaggctgccccggaggatgccgcaagctccccctagcctctgtgttaccccctacccggagccctcagagtgctcctggaaggaccccgaggcagaagccgcccttgagctggcgctaagcatcacgcgagccgtgcgctccctgcgggccgactacaacctcacccggatccggcctgactgtttcctggaagtggcggatgaggccacgggcgccctggcatcggcggtgtcgggctacgtgcaggccctggccagcgcaggtgtggtggctgttctggccctgggggctcccgccccccagggttgcgctgtggctctggcttctgatcgctgctccatccacctgcagcttcaggggctggtggaccctgcacgggagctgggcaagctgcaagccaagcgagttgaggcccagcggcaggcccagcgtctgcgggaacgccgtgctgcctcgggctatcctgtcaaggtgccgctcgaagtccaggaggcagatgaagccaagctccaacagacagaagcagagctcaggaaggtggatgaggccatcgccctattccagaagatgctgtgatccaccacccagcttcacccctcacccccagcggctcaccatggggatggcagcaataaaatattttcccacaaaaaaaaaaaaaaaaaaaaaaaaaaaaaaaaaaaaaaaaaaaaaaaa

SEQ ID NO: 142 - DNA, 2268 bp, Homo sapiens
  misc_feature (2169): n equals a,t,g, or c
  misc_feature (2196): n equals a,t,g, or c
  misc_feature (2232): n equals a,t,g, or c
gcctgcctcgagaggtgtggctcctggagaccccacaggccgatgacttctggtgcgagggagaaccctatccaggtcccaaggtcttcccttgaagccactggcgcccaggagcggtgggccgaagacgtgccctaccctaccacaagggctgtgtctctaccccctagcctgggcgttggatctactggaatgagcagcagccgcttcctcggcagccttgggaagcacgggcgactggacagcagccgccgggcacggttatgggggcggggtgggcggggaggctagattgtttcctggtactgtcactgccactggggctttgatttggaggaatggggcaggggactatctgaagcgcttccatcctaaagccataatgaaaatatcttcctctcttccccattctatacaaaatactaagtggttttcttgctcccactccctaccccttagttaaatagggtttattttccactcatgcccttatgcctttttttcttatagttttttaacttattgactgtgcatgacccagtggtttgaattgtttttagttcaagtcattggtaaaaactaggtttaaggagatgagctactgtttaaagtgagctggcctgcctaattaattccttgtgaaaactaaatgattttttcagtttggggatcattctcacaacataactatgcatgtagaggacaagatttattttctttcctccctttgcccagtagccacatctggtttactcaggcagcatctactaagaaattcagcacctgcatatctctgtgacatggtcacttagagcttatcttccctatgaatctccagatctgtgagtcgagcagatttcatgttgcagattcacctttaatgcaaagactgtattatcctcacatgactttttttcttgtcttactgtaccttaaaaggtgatagagtaattctgtattttctaacgggaagattcaaaggagctgaatgtgttatgcttccaaacaactgaatgtaaaacactcctagccagttgttgcattccctatatttatttacttccaatattttactgtaaaagtagggagaaatattatgttgatagttgtttcatattctctcaggaactttaatgttcccgactcgggtgattccagctgtgttgctggcagtgttgtctcaaccctctccctaaaatgactgagccctgggttcatctaatgtggttttccttaggaagagatagaaggcacagaagatcacagctagagaattgagaattaactatactactagccattttagggcaccaaaacttgggattaaacacttcctacttcccactcccaactcctgaaatgaagtcttgctatctgtgactagttttatttttgtgcttttaatagtccgagcagtcttaccttgtttacacatgtattgacaccatttgcttcaggccatggagcactgtttctccctttttactatttataggattccgttttttcacaagacttttaataaaaagaaattgtagaaataaacacattaaaatttgcccagctgtcgtctaagccctcttgattgacttgcccaagtggcaatagagttctaatatctataataaagggagatttgctattattagtggaatgttgaccccgtatgtagagaaacagtacgtgcctttscctctttatgcacacagagacccagggtgagggagtatttgttcccagtttttaagatagtataaaaaagcaaatacttggtgagtgatttaaaaataaaaccaaaacaaaacacaaaaagatattccacaggacatgccactttattataaaacctgacacaggcatagtaccaagtatttcctgcattgttgctaaaattgttttattgtagctccacattctggtgtagtttaaaatgcctttgggggcagtttgaagcagttcttcatgccacttagtttgaaaataaaattctagrtatgcaaatgattttcttagaaaacttcacaaaataaaagatcttgttttttttccatagcacagtaatgaatgtggttatcaatcacatacttttttggattatattgtagcaaaaagttgattagcttaccaagattattaatagcaatgtatgtgttataatacaacttagtnacattaaagcctacgaaaactcatccnggctgtaggatagtaataaaggaagaattatgactncattatgaaaaaaagaagttttaaagttttcaatac

SEQ ID NO: 143 - DNA, 1757 bp, Homo sapiens
aattcggcacgagagcagcatcttatcagttttgtttattcgatttctaaaatgtgctgatccttttaaaactcctgcttatctctgcaacaaagaaaaatattcaaaaatactgccttcattttcacacacagtgctgaagatgctgcaagaccaaatcatagctcataaaatcaggtcctgagatagttacccataaagaggaatcctttgagtgtatgccattggtgagccgatgagcatggaccatagaagggctcaatgtagaaggtaaaattggcaaatcataattgagaaatatgaaatgtattcccatacataatatggtatagggtgtaatgtacctgcttttgatcacttttcattttaaagtgctattcacttgatcttaaatgttccatgaactgttaaatttcttaagttacatagttactacaccacatttatgtgtatgttatgttttaatagtcaatgataggtatgtacaattgataatataaaggggctcattgaaacttgagagcctgttgagttttggttagttgtagattgcatttttataaaaaaaaatacagatagattgatgataatagatattggggcattgtttctgtctcatgagaattcttttattcattaccataagccttcactgatactataagcattattttaaatgacgctgatcttaagtctgaaataaatggaaagcagaaaaggtgagccagttgatttgaatgcattggatattagtgttagaaacaatgtatagtttagattgaaactgaactgacttatttagcacttaaacaaaaatttgacaatgtttttagttttttttaagacagcttagtgtggtgatacttagaattctatggtttgatgtttcttttagaaatgagaagtatagttttattttttaatataaaaaatggttttaatactaaaactagtaatttgatactagttgtttataaacattgtaaaatatatcttttaaacaaattatcttggtagttaattcataagggtgggtttgggtaggaatagcagagtactttcagagggaaaggggagtcattcagaagtgatagcattttatttgtttgaatactctgccagtaaaatcagctgtacttagaaagttatctgttgtgtagaataatgatgtagagtttactaatcagtgaggatgtcttgtttttattttctgcaaactctgcctcactttaaaatgcattataacaatacctaattaaagataattttggctctgaaagttaccttattttttgttgagttagtgacttcatttttcttgccacaatataagcttttgagggatttttttaaattggtgcttttaataagcaaataaatcccagggttttattttcttcagtgatacccctatagaaactcttaaatgtatttgcgcatatatatatatatattttcttatgcatgctcgatgcattttcgtcctgagaaaaatgttctctacagaaactacccgtgtgtaaaaagaagattggcttaaaatggctactgtgatgggaacagtgtcttagggagatgcagcttggacttgaggtaaattgaatactttacaactgtggtttagagtttgctttaatgacattgtatgtaaaaggtcacatgattgctgtaattttgtattcattatggtttcctcaataaatgtacattgatgactattaaaaaaaaaaaaaaaaaaaaaaaaaaaaaaaaaaatt

SEQ ID NO: 144 - DNA, 1062 bp, Homo sapiens
  misc_feature (52): n equals a,t,g, or c
  misc_feature (1056): n equals a,t,g, or c
acccacgcgtccgcccacgcgtccgcctggactgtgacccagccagcaccgnctctcctagtggcaactggctgggaatggctgaggggctacctactgcttgcggcctgccagcgggaggaggggggcggaaagaagaaagggggcggggttgaggggggcgggcctggacctggggagtgaaagcgaaagcccgggcgactagccgggagaccagagatctagcgactgaagcagcatggccaagccgtgtggggtgcgcctgagcggggaagcccgcaaacaggtggaggtcttcagrcagaatcttttccaggaggctgaggaattcctctacagattcttgccacagaaaatcatatacctgaatcagctcttgcaagaggactccctcaatgtggctgacttgacttccctccgggccccactggacatccccatcccagaccctccacccaaggatgatgagatggaaacagataagcaggagaagaaagaagtccctaagtgtggatttctccctgggaatgagaaagtcctgtccctgcttgccctggttaagccagaagtctggactctcaaagagaaatgcattctggtgattacatggatccaacacctgatccccaagattgaagatggaaatgattttggggtagcaatccaggagaaggtgctggagagggtgaatgccgtcaagaccaaagtggaagctttccagacaaccatttccaagtacttctcagaacgtggggatgctgtggccaaggcctccaaggagactcatgtaatggattaccgggccttggtgcatgagcgagatgaggcagcctatggggagctcagggccatggtgctggacctgagggccttctatgctgagctttatcatatcatcagcagcaacctggagaaaattgtcaacccaaagggtgaagaaaagccatctatgtactgaacccgggactagaaggaaaataaatgatctatatgttgtgtggaaaaaaaaaaaaaaaaaaaaaaaaaaaaaaaaaaaaaaaaaaaaaaaaaaaaaanaaaaaa

SEQ ID NO: 145 - DNA, 1030 bp, Homo sapiens
aaactgactggggtcaattcaagtcatgcaggctgtgagaaacgcggggtcgcggttcctgcggtcctggacttggccccagacagccggcagggtcgtggccagaacgccggccgggaccatctgcacaggcgctcgacagctccaagacgctgcggccaagcagaaagttgaacagaacgcggctcccagccacaccaagttcagcatttaccctcccattccaggagaggagagctctctgaggtgggcaggaaagaaatttgaggagatcccaattgcacacattaaagcatcccacaacaacacacagatccaggtagtctctgctagtaatgagccccttgcctttgcttcctgtggcacagagggatttcggaatgccaagaagggcacaggcatcgcagcacagacagcaggcatagccgcagcggcgagagytaaacaaaagggcgtgatccacatccgagttgtggtgaaaggcctggggccaggacgcttgtctgccatgcacggactgatcatgggcggcctggaagtgatctcaatcacagacaacaccccaatcccacacaacggctgccgccccaggaaggctcggaagctgtgatgggaaggaggcctgcacttggacctgacctcaagcctcagctccagtgggaccttgtaaaatgctccctgtcagagctctccagaatatgcttgttggagatccttcaggcagtaagggagagttttgcctccttacacagtggcctttgcttgcacctccagctggagatgggtgtgccccagaagtaagctttgcatctcttacaagaggggagctacaggggcagccgtgcctaggcccaaactctgctctgagaaaataaatatctgtaccacctgtcataattttgagattttttgctttcagagttacgtaattcctaattcctcttgaaaaagagagtgtgaaatgaggtgaggcctcagatgaaagtaaaatataaatgtgagttgctatttaccagaaaaaaaaaaaaaa

SEQ ID NO: 146 - DNA, 814 bp, Homo sapiens
ggcacaggccaggtcgtgccagcatccgccggacgccggaagtggttctccgcccctgccactgggccatggagactgtggcacagtagactgtagtgtgaggctcgcgggggcagtggccatggaggccgtgctgaacgagctggtgtctgtggaggacctgctgaagtttgaaaagaaatttcagtctgagaaggcagcaggctcggtgtccaagagcacgcagtttgagtacgcctggtgcctggtgcggacaagtacaatgatgacatccgtaaaggcatcgtgctgctcgaggagctgctgcccaaagggagcaaggaggaacagcgggattacgtcttctacctggccgtggggaactaccggctcaaggaatacgagaaggccttaaagtacgtccgcgggttgctgcagacagagccccagaacaaccaggccaaggaactggagcggctcattgacaaggccatgaagaaagatggactcgtgggcatggccatcgtgggaggcatggccctgggtgtggcgggactggccggactcatcggacttgctgtgtccaagtccaaatcctgaaggagacgcgggagcccacggagaacgctccaggagggcctgtccatcctcgctgtcctttccctgttctccccctgccccccgtctctatcctctgtggccttcagctaatttctgctcccctgagattcgtccttcagccccatcatgtgctttgggatgagtgtaaataaaacggggctgtggcttgggaaaaaaaaaaaaaaaaaaaaaaaaaaaaaaaaaaagggggggg

SEQ ID NO: 147 - DNA, 2678 bp, Homo sapiens
cccacgcgtccggatgaacacgatgagaataatgctgaagctagtgctgaattatcaaatgaaggggtaatgaaccatagaagcgaggaagaacgtgtaaccgaaacacagaaaaatgagcgtgttaagaagcaacttcaggcattaagttcagaattagcccaagccagagatgaaaccaagaaaacacaaaatgatgttcttcatgctgagaatgttaaagcaggccgtgataagtacaagactctgcgacagattcgacaaggcaatacaaagcagcgtatcgatgagtttgaagcaatgtgagagctgttattttgcatatatgttcttcataagctgaaccaccaacagagaaaagcaggcctttgcagatatgatggaatgcatcccaccttgccaaagcacttacaccagtttgactgtgctagctaaaagacaaatttaaggggagctcttcaacattaaggcagtatgatatcatgcttggttttcttttttcttttggtccagggaatggagaatggtgttccattgcctcttttcacattttttttctttttcttttttttttctgttgaagattaacactaattatcacgtctgacaaatgtgtatgtgtggtttcagttctgtgtacattttaaaggataatggtgaacattttaatgggtttcccttgccctttccatatttaacctatttccacattctctctcactcacattttctcagtgtgcccttctcttatctgccatgtccatagccataattccaccatcatacagatcaggcagtgtttaaaatgatggtaggtagcacagtggacagtctttgatcatcatgtagaatatggctatgaatcaggaaagagattagaacatttaataatgtatgtacagctggtgcttagtttttttttaatctaaatttaattaccttattggatatttgatatttggttatttaatcacagtcatctttaacagcttacactgattggtgttttatctcctgtgatcctttgatggctttttttgcctaccatttcacagaggtttagacagcagtagtagctccctaggagagtttactgatgaaacagcctctgcaagattttaaaagttttgttcttttatagactgatttagaaaaacaaatgattagttaaaaaaagaaaatatacatttgttggtaactaatgttattttttaaaacctggacctttcctggragggcagcatataaraacatcagtgcccgaggaggggacaacaatactacctcactactacatctgtgatgactggttgttcaaacacaatggagtgtgtaaggtatatgttttataattcataaccatagcctcgatcatcaagaaatactttcgaaatttcattttccttcagaatatcttaagagtgctaaatttttaactgcctttttgtcgagtcaaactgtgggattctgatttgtattaaaattgtaagctcctcactggtatactatcatcctggaggggtgttgtatggctgagcaagagagagagagaatgagagagagactgtgtgtgtgtgtgtgtgtgtgtgtactctgtgtgtgtatgagagagagaaatgctaaccttgtagcatgtgaagaatgtctgtaccttgatacgatagttacataatcagtatatttggtttctagatcactgtgcttattttgtttcaatctctgactaaaaatacttaaatttggtttgttaattcttattttagaaattataattttagtttatattaatttcggttatagcttactgaagaaatctttccagttagaaggaggttctaatattcacatgttctaatactttgtttattgtaaaacagctaaatttggagatacgtaaagccttgttttctctgtgtggttcagctactttccatttggtattacacagtcaaatttacatttatctattaaaattgccattttattaaacattttcatgcacagtagattcaagttgtgtctgaaaatatctcttgtgcttttttgattttgctgactttaaaaggattaatctgggcagacattatgtaaaagaaaggttgcgtttaatatattttttgaactttgtaggacaaaacatagctggttaaccttgaagtgactgttgtaccatggttgtgcacatgcttcagaatcctatggaagagaatattcctacttgcagtacatcaaaggaatggatggtggaccctactattcatgttttgagacataaatgttcactttaaagcaattgcataatagataaaaacctgaactttcattggatttttgttaattttcctcattttgaattatgtgcactaccatagctacatcagtttgatacagtattgaaaaattatcagttatattttgcygtttatgrtctatttgtagrttaggrttaaaatggrtttaatccatttttaaggstgtgtgaatttttctaaacaagaaccatttgcaatatggatttcttagagattaaaccaattataacttattagcagtsgcgagcacatgttcatatagtcaatgtaaaaatacactaatgagtatttggtaaatcccagtaggcttttaccattagcataattttgtgttgtacctcggccgcgaccacgctaagccgaatt

SEQ ID NO: 148 - DNA, 1028 bp, Homo sapiens
ctgcctcagcctcccgagtagctgggattacaggcacacaccaccacgcccggctaattttttgtgtctttttagtagagacggggtttcgctatgttggccagactggtcttgaactgctgacctcgtgatccgcccgcctcggcctctcaaagtgctgggattctgtgtgttttgtgcacctccactttaggtaatcatagggagcacatttacaggatggtctaataacatgaaaacaggctagtttcaagcaacagcaatgtcggttggaaagcaggcgtcatttgccttgaaaaaagccttttgacaacatacaggcattcttttaaaaccaggctgaaacattttatttccgagacttaacgttgtgtttcctgtttcttaaacctagcacctctgtgtatttgaaaataatgagacatctttcattggattttggaaaattgttccccatgggattctaacctcactaccaaatgagtgaaagcttgattaagagttcttccatatactagcctccttggaagaagtgatcagaaggtgataagaaggacagaaaggactattttaaagttggactgaaggagaaaaaagcaaaattcttgtttcatcccaattctagttagaacaaagttaaacccccgtaatcttaaagagaaaatctttggaggttttaattaaacattttatacatttaaagtcttgttaatggtgctttaagtgtcaatgtagcatgtaaaaggctttgtacagacaggtaaaagttccatttctgagtgatgaaatgtaacacttcttcatctttaacttgaaatcaaaactatcagattttatttttgtataatttaaggaaggtaaagttaggggactagaagactctaaattggcttctacagatcaataatttaaatgtaactagttgggattttatagttaaaattatatttgtgtatataacataactaatctgtaaattgtaataaatatatttgcaattattaaatgttaagtgatattttggttca

SEQ ID NO: 149 - DNA, 1425 bp, Homo sapiens
  misc_feature (647): n equals a,t,g, or c
  misc_feature (1359): n equals a,t,g, or c
gcgtctccggaagtggaggcgggagcggcacggcagccactgcttggggtagcgggagggcagactctgggcgccactcccgggccggtcatgaacgggccggcggacggcgaagtggactacaaaaaaaaataccggaatctgaagcggaagctcaagttcctcatctacgagcacgagtgcttccaggaggagctgaggaaagcgcaaaggaaattactgaaggtgtcccgggacaagagtttcctcctagaccgacttctgcagtacgagaacgtggatgaagactcttcggactcagatgccactgcatcatcagataacagcgagacggaggggacacccaagttgtctgacacaccggcccctaagaggaagagaagccctccgctggggggcgccccctctccctccagcctctccctgcctccttcaacagggtttccccttcaggcctccggggtcccctccccatacctgagctcgctggcctcctcccgctaccccccattcccttctgactacctggccctgcagctgcccgascccagtcccctraggcccaagcgggagaaacggccccgmctgccccggaaactcaagatggcggtgggaccccccgaytgccctgtgggagggccgctgancttccctggccggggttytggggstggggtcgggamaaccctgamcccccttccaccccctaagatgcccccccccacgatcctgagcacggtccctcggcagatgttcagcgatgcaggtagcggggacgatgccttggatggagacgatgacctggtgatcgacatcccggagtgaccgtgacatcacgccatgcccaccacggccccgcccggcgccctccccgtgccagcacacacgagtccagcttcctcggaggtgtttattgatgcccagctgccatgctccggccactgacacaaccagaaaaggcgtaaacatgcacgggtgtcccccaggagggtgcaggggccctgccttcaaaccccgggcccctccaggggacagttatttaaacgagtggccgggagcatctgccacctgctggggaggcagagaccctgcaatggccacctctttaaaagggcagctgtacagggctaggttttttcaatgaagtttctgtattaaaggagtggctctgggtttgttttttgtcctttttttttgagacattctcctcctctgaacctcccctaatccgacctcctccctgttgggggagagggacggggcagcgtggagaggcaggagtgaggagcgcgggggcctggggccgggctctgagcactgcccgggtgtgcagatgatggggggtttgcatatttgcangggactagcgagtcaggcaggaggtttgcatatgtgaatatagaactccgcagcccctcatgagca

SEQ ID NO: 150 - DNA, 780 bp, Homo sapiens
  misc_feature (285): n equals a,t,g, or c
gctgcgagaagacgacagaaggggagagccaatggaaaggggctgccgcgcggccgtaaagagtttgtagagcagttcgggtgcggtacgttgcattccggtaccggacgccgagagcggtttgtctccgtctctggagttgtaggcgagaggtgatcatgtccggtcgcgggaaacagggcggcaaagtgcgagcaaaggccaaatcccgctcctcccgcgcgggcctgcagttcccggtgggccgagtgcacagactgctgcgcaaagggaactacgcggasnagtgggcgccggggcgccggtgtacctggcggcggtgttggagtaccttacggcggagatcctggagctggctggcaacgccgcgcgtgacaacaagaagaccaggataattccccgccacctgcagctcgccatccgcaacgacgaggagttaaacaagctgctgggcaaagtgaccatcgctcagggcggcgtcctgcccaacatccaggccgtgctgctgcccaagaagacggagagtcagaagacgaagagcaaatgaccctgacgccgccctcagggagctggctccsccagcaaaggcccttttcatggtcgtcccgcaatgcttttgaatgtgctggatgtcatggagggccggtgacatctagcggggaggtgggcggcgagggtcccggcgggagccaataaagttggtgaaaatcgtaaaaaaaaaaaaaaaaaaaaaaaaaaaaaaaaaaaaaaaaaaaaaaaaaaaaaaaaaaaaaaaaaaaa

SEQ ID NO: 151 - DNA, 1066 bp, Homo sapiens
  misc_feature (1061): n equals a,t,g, or c
ggacccgccatggcgcggaagaaggtgcgtccgcggctgatcgcggagctggcccgccgcgtgcgcgccctgcgggagcaactgaacaggccgcgcgactcccagctctacgcggtggactacgagaccttgacgcggccgttctctggacgccggctgccggtccgggcctgggccgacgtgcgccgcgagagccgcctcttgcagctgctcggccgcctcccgctcttcggcctgggccgcctggtcacgcgcaagtcctggctgtggcagcacgacgagccgtgctactggcgcctcacgcgggtgcggcccgactacacggcgcagaacttggaccacgggaaggcctggggcatcctgaccttcaaagacgcctctttttcttcatcagggaagactgagagcgaaggcgcgggagatcgaacacgtcatgtaccatgactggcggctggtgcccaagcacgaggaggaggccttcaccgcgttcacgccggcgccggaagacagcctggcctccgtgccgtacccgcctctcctccgggccatgattatcgcagaacgacagaaaaatggagacacaagcaccgaggagcccatgctgaatgtgcagaggatacgcatggaaccctgggattaccctgcaaaacaggaagacaaaggaagggccaagggcacccccgtctagaatgccagaaccagcgggtggccttaggggctgtgaggcagtggggaccttattgatgaaagaaaccgtctttgcgttacacccgagtctgcctctcggagcagggagctcaccttccgcgacgtgttctgagggtctgcatcttaggggggagggctggggcaaatcgccacctgtgcctttcctctggccctgctgcccccacacccaactccgagggcccacgctggggaaagcgggaagcgctcgctccctttcccccattagtgctctctctgcctggatcccggcagaagctatgaaagggaataaagagaaaagaartamaaaaaaaaaaaaaaaaaaaaaaaaaaaaaaaaaaaaaaaaaaaaancccct

SEQ ID NO: 152 - DNA, 1649 bp, Homo sapiens
  misc_feature (1543): n equals a,t,g, or c
  misc_feature (1579): n equals a,t,g, or c
accccggctctccaaggaggtgtgacatcatcatcatctctggccggaaagaaaagtgtgaggctgccaaggaagctctggaggcattggttcctgtcaccattgaagtagaggtgccctttgaccttcaccgttacgttattgggcagaaaggaagtgggatccgcaagatgatggatgagtttgaggtgaacatacatgtcccggcacctgagctgcagtctgacatcatcgccatcacgggcctcgctgcaaatttggaccgggccaaggctggactgctggagcgtgtgaaggagctacaggccgagcaggaggaccgggctttaaggagttttaagctgagtgtcactgtagaccccaaataccatcccaagattatcgggagaaagggggcagtaattacccaaatccggttggagcatgacgtgaacatccagtttcctgataaggacgatgggaaccagccccaggaccaaattaccatcacagggtacgaaaagaacacagaagctgccagggatgctatactgagaattgtgggtgaacttgagcagatggtttctgaggacgtcccgctggaccaccgcgttcacgcccgcatcattggtgcccgcggcaaagccattcgcaaaatcatggacgaattcaaggtggacattcgcttcccacagagcggagccccagaccccaactgcgtcactgtgacggggctcccagagaatgtggaggaagccatcgaccacatcctcaatctggaggaggaatacctagctgacgtggtggacagtgaggcgctgcaggtatacatgaaacccccagcacacgaagaggccaaggcaccttccagaggctttgtggtgcgggacgcaccctggaccgccagcagcagtgagaaggctcctgacatgagcagctctgaggaatttcccagctttggggctcaggtggctcccaagaccctcccttggggccccaaacgataatgatcaaaaagaacagaaccctctccagcctgctgacccaaacccaaccacacaatggtttgtctcaatctgacccagcggctggaccctccgtaaattgttgacgctcttcccccttcccgaggtccgcagggagcctagcgcctggctgtgtgtgcggccgctcctccaggcctggccgtgcccgctcaggacctgctccactgtttaacactaaaccaaggtcatgagcattcgtgctaagataacagactccagctcctggtccacccggcatgtcagtcagcactctggccttcatcacgagagctccgcagccgtggctaggattccacttcctgtgtcatgacctcaggaaataaacgtccttgactttataaaagccaaacgtttgccctcttcctttcccacctccctcctgccagtttcccttggtccagacagtcctgtttgtggagtgcaatcagcctcctccagctgccagagcgcctcagcacaggtgtcagggtgcaaggaagacctggcaatggacagcaggaggcaggttcctggagctngggggtgacctgagaggcagagggtgacgggttctnaggcagtcctgattttacctgccgtggggtctgaaarcaccaagggtccctgaccctacctccactgcca

SEQ ID NO: 153 - DNA, 660 bp, Homo sapiens
  misc_feature (35): n equals a,t,g, or c
ccggaaattcccgggtcgacccacgcgkccgcggnagwgctcacacgtgtgctccctgccctgctcctggccccttggccggccgggctgtttctggccatgggtcgctcccgccggacaggcgcgcaccgagcgcactctctagcccggcagatgaaggcgaacggcggcggccggacttggatgagattcaccgcgagctgcggcctcagggatccgcacgaccccagcccgacccaaacgccgagttcgaccccgacctgccagggggcggtctgcaccgctgtctggcctgcgcgaggtacttcatcgattccaccaacctgaagacccacttccgatccaaagaccacaagaaaaggctgaagcagctgagcgtcgagccctacagtcaggaagaggcggagagggcagcgggtatgggatcctatgtgccccccaggcggctggcagtgcccacggaagtgtccactgaggtccctgagatggatacctctacctgacatggcctgaagatgcagggcagaggaattgcccatggacagtgacgcaaggactaggctgggagggagcgtgccaaccccttttgcctctgggtttggggagcggagggcctcttcttggtgccctgcccccaataaaggaactggacaaagagaa

SEQ ID NO: 154 - DNA, 605 bp, Homo sapiens
  misc_feature (449): n equals a,t,g, or c
  misc_feature (574): n equals a,t,g, or c
  misc_feature (578): n equals a,t,g, or c
  misc_feature (583): n equals a,t,g, or c
  misc_feature (587): n equals a,t,g, or c
  misc_feature (596): n equals a,t,g, or c
ggcagagctccaccttccatccggcgccggctttcggcgcgacggtcgccgcgttccatcgtcgcgcggcccttcgggcgcccgagcccgcaatgtcgggccccaacggagacctggggatgccggtggaggcgggagcggaaggcgaggaggacggcttcggggaagcagaatacgctgccatcaactccatgctggaccagatcaactcctgtctggaccacctggaggagaagaatgaccacctccacgcccgcctccaggagctgctggagtccaaccggcagacacgcctggagttccagcagcagctcggggaggcccccagtgatgccagcccctaggctccaagagcccccaaccgggacccaaccctgcctccctgggctaggctctggcctgggcactcamcccctggcttagacamcttctcaagggctggccttcanggacccctggtgggtctgcctgcctgggccaaccttcctgcctgggsctycccttggctamctgggscagcccccaccaactggcatgccctcctgggggccaaagaatggggcctgcaacccanccanttgcntgcncaacccaanttcctgggg

SEQ ID NO: 155 - DNA, 695 bp, Homo sapiens
  misc_feature (173): n equals a,t,g, or c
  misc_feature (499): n equals a,t,g, or c
gaaccctagaaaaaaggatgcagtactaaagtgtcattcattcaaagccactcctcttttggtattccacccattttccagacggtgacactgaggctcaggaagcagtagggacttgcacaaagccctttgggaagcaggctgggaaacagtggagggagggtgtccattanccccaaggagacacaggatctgggctctktytttsgccttcctcccagaatacgctgccatcaactccatgctggaccagatcaactcctgtytggaccacctggaggagaagaatgaccacctccacgcccgcctccaggagctgctggagtccaaccggcagacacgcctggagttccagcagcagctcggggaggcccccagtgatgccagcccctaggctccaagagcccccaaccgggacccaaccctgcctccctgggctaggctctggcctgggcactcaccccctggcttagacaccttctcaagggctggccttcanggacccctggtgggtctgcctgcytgggccacccttcctgcctgggrcctccccttggkcctactggggccagcccccaccacctggcatgccctcctggggccaagagtgggcctgcaamccacccattgsctgcccaaccaattcctgggcgytccccawtytgcccaggcttgaatgttcacatgaaatgggt

SEQ ID NO: 156 - DNA, 780 bp, Homo sapiens
  misc_feature (289): n equals a,t,g, or c
cggtgggctcgcgttgaggctgcggtcatggagggagcaggagctggatccggcttccggaaggagctggtgagcaggctgctgcacctgcacttcaaggatgacaagaccaaagtgagcggggacgcgctgcagctcatggtggagttgctgaaggtcttcgttgtggaagcagcagtccgcggcgtgcggcaggcccaggcagaagacgcgctccgtgtggacgtggaccagctggagaaggtgcttcgcagctgctctggacttctagggatctcagccgtggcknaggccacccccagaggagcccctggtccacagaagcaggccttgtgtttccagcggcctctgataagaggcagggaaggamctgaaggatttggarttgattcaaacaagatctctgggagtctccagcctgtgcagaaggggcaggactgcagtgcactgcgggccttggagtgtccagtggggacactggtgtgggaaggggcagcacctggggagtccctgcctctcctccctgggacaatagtgtgcatgccacccggggtcctacaggcaggtgctgggaaaggcctggccagcaggtagcctgtgtgtttgacaaacagcagctggcagcgctgcctcctgcccacattcctgccacccgacatcaaagctggcgtgtgacctttccagccatgcgatattccccttggaagatgcttccccaggctataaatttgttctcacaaagcaacatcaataaatcaaaactgtctctyccaaaaaaaa

SEQ ID NO: 157 - DNA, 1127 bp, Homo sapiens
  misc_feature (1113): n equals a,t,g, or c
aacttcagtgccctcactgtagaatttaaaagccttactgttgattgcccatggtggacttgatggagaaattaaatatctttcattatgctttacaaaatactgtatatgtttcagcaagtttggggaatgggagaggacaaaaaaaagttacatttaatctatgcatttttgccaagccatattgagttattttactactagagacattaggaaactaactgtacaaaagaaccaagtttaaaagcattttgtggggtacatcatttctataattgtataatgtatttctttgtggttttaaatgataaagacattaagttaacaaacatataagaaatgtatgcactgtttgaaatgtaaattattcttagaacactttcaatgggggttgcattgtccttttagtgccttaatttgagataattattttactgccatgagtaagtatagaaatttcaaaaaatgtattttcaaaaaattatgtgtgtcagtgagtttttcattgataattggtttaatttaaaatatttagaggtttgttggactttcataaattgagtacaatctttgcatcaaactacctgctacaataatgactttataaaactgcaaaaaatgtagaaggttgcaccaacataaaaaggaaatatggcaatacatccatgatgttttccagttaacataggaattaccagataaatactgttaaactcttgtccagtaacaagagttgattcatatggacagtatgatttattgtttatttttttaaccaaatacctcctcagtaatttataatggctttgcagtaatgtgtatcagataagaagcactggaaaaccgatcgtctctaggatgatatgcatgtttcaagtggtattgaaagccgcactgatggatatgtaataataaacatatctgttattaatatactaatgactctgtgctcatttaatgagaaataaaagtaatttatggatgggtatctttaatttttactgcaatgtgttttctcatggctgaaatgaatggaaaacatacttyaattagtctctgattgtatataaatgtttgtgaaattccatggttagattaaagtgtrttgggaanaattctccatgggg

SEQ ID NO: 158 - DNA, 1282 bp, Homo sapiens
  misc_feature (120): n equals a,t,g, or c
  misc_feature (205): n equals a,t,g, or c
  misc_feature (207): n equals a,t,g, or c
  misc_feature (236): n equals a,t,g, or c
  misc_feature (732): n equals a,t,g, or c
  misc_feature (1279): n equals a,t,g, or c
tgctctacaaatagtaaaaataaaaaataaaaaaagtagctgggcgtggtggtgtgcacctgtggtcccagctgcttgggatgctgaggtggaaggatctcttaaacccaggagggtggnaggctgcagtgaacttgcgattgcaccactggcactccagtctgggggacagagtgagaccccatctcaaaaaagtgtttaattnantatacttgtgagtggtctatttgcatttnaaaactgctttctagaattaggatagctcccttaggtttaatgttttggtgagcaggaatatcagttacccctccagatcttaattctagtttttttatcactttttcatgaggtgatctcatcctcatctcctagcatgtctggcaattttgatttctgaactctgtgctacctcagaggccagcttccttagggaaaaatcagtgctgaaataaagttatatttccttttctgctctaaatatatagtgggggaataagagaaatgaagaggaattcctgagaacgtaattactagaaactcccctctcccacgtaatgtctctcacacaccatggacccctattcccccaatttgcgaccccccaccccaccccacaacaggtggtgatctttgtgaagtctgtgcagcggtgcattgccttggcccagctactagtggagcagaacttcccagccattgccatccaccgtgggatgccccaggaggagaggntttaaagattttcaacgacgaattcttgtggctaccaacctatttggccgaggcatggacatcgagcgggtgaacattgcttttaattatgacatgcctgaggattctgacacctacctgcatcgggtggccagagcaggccggtttggcaccaagggcttggctatcacatttgtgtccgatgagaatgatgccaagatcctcaatgatgtgcaggatcgctttgaggtcaatattagtgagctgcctgatgagatagacatctcctcctacattgaacagacacggtagaagactcgcccattttggaatgtgaccgtctgtccttcaggagaggacaccagggtgggggtgaaggagacactactgcccccacccctgacagcccccaccccatggcttccatcttttgcatcaccaccactcctgaacccccatttctgatttgtcagaatttttttttaacaaaactaaaaatgaaacacatgtgtctgtggtatctaaaaaaaaaaaaaaaaaaawwgggggggsgcccgtacccattggncct

SEQ ID NO: 159 - DNA, 1505 bp, Homo sapiens
ttacatgttgcagaagctaattgaagagacagataggtttgtagtgttcacagaagaggaatcaggcatgagtgaccagttgtgtggcattgctgcctgccagacggatgacatatacaaccgaaactgccttattgaattggtcaacctgtcagatggttcttcgtggagcagagacakaaggctgtgtcattgtgtcagctgccaaagcccaactgctgcagtgccagcaccatccagcctggtatggtgatacattgaagcaaaagacatcctggacttgcctcttggatggcatgcagtactttgccaccactgaaagcagccccacagagcaggatggccgacagctctggttagaggtgaagaatatcgaggagcaccggcagcgtagtctggactctgtgcaggagctgatggagagtgggcaggcagtgggcggcatggttaccacaaccacagattggaaccagccagctgaggcacagcaagcccagcaagtccagcggatcatttcgcgttgcaactgccgaatgtactatattagttacagccatgacattgatcctgaactagcaactcagattaagccacctgaagttcttgagaaccaggaaaaggaagatctcctaaagaagcaggaaggggctgtggataccttcacccttatccaccatgagctggaaatttccaccaacccagctcagtatgccatgatcctggacattgtcaacaacctgctgctccatgtagaacctaagcggaaggaacatagtgagaagaagcaacgggtcaggttccagcttgagatctctagcaatccagaggagcaacgcagcagcatactgcatttgcaggaggctgtgcggcagcatgtggcccaaatacgacagctggagaagcagatgtattctatcatgaagtctttgcaggatgacagcaagaatgagaatctgcttgacctgaaccagaagcttcagttgcagctaaaccaggagaaggccaacctgcagctggaaagtgaagaactgaatatcctcatcaggtgttttaaggatttccaactgcagcgggctaacaagatggagctgcgaaagcacaagaagatgtgagtgtggtccgtcgcactgagttttactttgctcaggcacggtggcgcctgacagaggaagatggacagctgggaattgctgaattagaactgcagaggttcctctacagcaaggtgaataagtctgatgacacagcagaacatcttctggagttgggctggtttaccatgaacaacctcctccccaatgctgtctataaggtagtactgcggccccagagctcctgccagtctgggcgacagctagctctccgcctcttcagcaaagttcggccccctgttgggggtatctctgttaaggagcattttgaggtaaatgtggtgctctcaccatccagctgacacaccattcttccacagatgatgggcttttctttcctggccgaagtgtgga

SEQ ID NO: 160 - DNA, 736 bp, Homo sapiens
  misc_feature (718): n equals a,t,g, or c
  misc_feature (723): n equals a,t,g, or c
aggcacgagggacacttggggtctggacgcaacggcggcgggagcatgaacgcccctccagccttcgagtcgttcttgctcttcgagggcgagaagatcaccattaacaaggacaccaaggtacccaatgcctgtttattcaccatcaacaaagaagaccacacactgggaaacatcattaaatcacgtgcctgcttccccttcgccttctgccgtgattgtcagtttcctgaggcctccccagccacgcttcctgtacagcctgcagaactgtgagtcaattaaacctcttttcttcataaattacccagtttctcatagttctttatagcagtgtgaaaacagactaatggacccttctggttgaaggaatgcagccattctgcttgtttgactatgtcctttctattcatctctatttcctgggaggtgtttatccaagtgcaataggaggtattggtgaccgcacagtcccctcagtgttctgctagtaaatagttgaaggttgatcattgatcttctgcgttttcagtctggcatggaaaagcccctgtgcaactggtaaagatatcaataagcacctggtgggtggcgggggtagtccaggcttgtcttgcaactgtatgttctcttcagacccctccctggcgatgccagattcactgggctggcagattctgccccccccaaaaaaaaaaaaaaaatattaataataaanaaaanagactcccaggga

SEQ ID NO: 161 - DNA, 995 bp, Homo sapiens
  misc_feature (59): n equals a,t,g, or c
  misc_feature (889): n equals a,t,g, or c
  misc_feature (899): n equals a,t,g, or c
  misc_feature (928): n equals a,t,g, or c
  misc_feature (933): n equals a,t,g, or c
  misc_feature (938): n equals a,t,g, or c
  misc_feature (974): n equals a,t,g, or c
gggtcgacccacgcgtccgggcggcctcggcagcggtgttctcgcgcttgcgaasgggnctccggctcggctcgcggggactgtgcacgaggttggcgacgcgccccgccgggccccagatcaggccgcagagatcgggagccgcgggagcactaaggcgcaagggccacagcagcagccgggctcagagggtcccagctatgccaaaaaagttgcgctctggcttgctgggctgcttggagctggtgggactgtgagcgtcgtctatatctttggaaacaacccggtggacgaaaatggtgccaagattcctgatgagttcgacaatgatccaattctggtacagcagttgcgccggacatacaaatatttcaaagattatagacagatgatcatcgagcccaccagcccttgccttctcccagaccctctgcaggaaccgtactaccagccaccctacacgctcgttttggagctcaccggcgtcctcttgcatcctgagtggtcgctggccactggctggaggtttaagaagcgcccaggcatcgagaccttgttccagcagcttgcccctttatatgaaattgtcatctttacgtcagagactggcatgactgcgtttccactcattgatagtgtggacccccatggcttcatctcctaccgcctattccgggacgccacaagatacatggatggacaccatgtaaaggatatttcatgtctgaatcgggacccagctcgagtagtagttgtggactgcaagaaggaagccttccgcctgcagccctataacggcgttgccctgcggccctgggacggcaactctgatgaccgggtcttgttggatctgtctgccttcctcaagaccattgcactgaatggtgtnggaggacgtngcgaaccgtgctgggagcattatgccctnggganggatngaccccgctgggcggcttttycaaacagcggcaaancgggcttagaagcagggagga

SEQ ID NO: 162 - DNA, 1125 bp, Homo sapiens
  misc_feature (972): n equals a,t,g, or c
  misc_feature (1023): n equals a,t,g, or c
  misc_feature (1077): n equals a,t,g, or c
gccctagtacggtccggaattcccgggtcgacccacgcgtccgcccacgcgtccgcgctggtgttgcggcgctggcgacagtcggggttgcgagcggcccggggccggggcggccagggccgctgcaggacgagaccctgggtgtggcgtccgtgccctcgcagtggagggccgtccagggcatccgcggggagacgaaaagttgccagacggccagcattgccactgccagtgcatccgcccaggccaggaatcatgtggacgcccaggtgcagacggaggcccccgtgcctgtcagcgtgcagcccccgtcccagtaygacatacccaggctcgcagcctttcttcggagagtggaggccatggtcatccgagagctgaacaagaattggcagagccacgcgtttgatggcttcgaggtgaactggaccgagcagcagcagatggtgtcttgtctgtataccctgggctacccgccagcccaagcgcagggtctgcatgtgaccagcatctcctggaactccactggctctgtggtggcctgtgcctacggccggctggaccatggggactggagcacgcttaagtccttcgtgtgtgcctggaacctggaccggcgagacctgcgtccccagcaaccgtcggccgtggtggaggtccccagcgctgtcctgtgtctggccttccaccccacgcagccctcccamgtcgcaggagggctgtacagtggtgaggtgttggtgtgggacctgagccgtcttgaggacccgctgctgtggcgcacaggcctgacggatgacacccacacagaccctgtgtcccaggtggtgtggctgcccgagcctgggcacagccamcggttycaggtgctkagtgtggccacygacgggaaggtgctactctggcarggcatcggggtargccagctgcagttcacagarggcttcgcctggttcatkcagcagctgccanggagcaccaagctcaagaagcatccccgcgggagaccgaggtgggcgccanggcaggctttcttccagtttgacctcaggttttcattttggcaggaagcggttnccgttcaattttcctggcattggagagcagccttaaggggtgcccatt

SEQ ID NO: 163 - DNA, 423 bp, Homo sapiens
  misc_feature (390): n equals a,t,g, or c
gggtcgacccacgcgtccgagatggcgtttcgcagcaagaggccggagcacggcgggcccccggagctgttttatgacaagaatgaagcccggaaatacgtgcgcaactcacggatgattgatgtccagaccaaaatggctgggcgagctttggagctcctttgtctgccggaggtcagccctgttacctcttggatattggctgtggttctgggctgagtggagattatctctcggatgaagggcactactgggtaggcatcgacatcagccctgccatgctggatgcggccttggaccgagacactgagggagacctgcttctgggggacatgggccagggcatccccttcaaaccagkttcattgatggatgtatcagcattctgcnaatcagtggctctgtaatgcaaaccaagaagtc

SEQ ID NO: 164 - DNA, 1642 bp, Homo sapiens
  misc_feature (1614): n equals a,t,g, or c
acccacgcgtccggcggctggcggagcagaacggattgcagggtcagccatgtcatctgagcctcccccaccaccacagccccccacccatcaagcttcagtcgggctgctggacacccctcggagccgtgagcgctcaccatcccctctgcgsggcaacgtggtcccaagcccactgcccactcgccggacgaggaccttctcggcgacggtgcgggcttcacagggccccgtctacaaaggagtctgcaaatgcttctgccggtccaagggccatggcttcattaccccagctgatggcggccccgacatcttcctgcacatctctgatgtggaaggggagtatgtcccagtggaaggcgacgaggtcacctataaaatgtgctccatcccacccaagaatgagaagctgcaggccgtggaggtcgtcatcactcacctggcaccaggcaccaagcatgagacctggtctggacatgtcatcagctcctaggagatggtggaagcaccccttgtcctgtgcttgtgggagactttgcggggaggaggcagcagacactggagatgacattcttccacacgagacggggcttcagccgggcatggtccctctcaagtatctcctggaggaaggggtatggggggcaggtgtggggtgtggggtgttcccggccatcagcacagcctatgaccattgcaacaacctctcaccatctgaagagcattaaaagcatttaaaaaggaraggtgcccactggtggctgagtggaggttccaaccccatcccagggagtggatcaagggtggtatttctccagctgctcagacacatgggctcaacccacagaatccctcttcctcctggagctggaggccccagattcccagatctggccccctggcagcctgacagggaccttgcgtgacttctccaaggcaaatttccacctaagtgccccttgcgcctctcctggggcctgggcaaagcagttttctaattcttggcttggttggttctaggggagctggcttgaagtgggkggggaaaggcgggggtggcggtctttggattggacggatgttgccttttggtgcctttgcagtgggaggcggcatagctgcctgtctggggaagacagttctcccagcactcccacccctgggcacagcaggctggtactgggaggctgaacccctcttagagcctgaccttttcatctgccttctggttgtgtgaccatcactcaacagccatttcacagcccctgtaattatggcggcggggggctggggtggtggtggtgggaagggcttgtggagaggacacagtctttgtttaaaaactttgtcccgatccatccagaaaagagtaggtagcttgcatcctgacagcctggcaaagtcaagaaagttgaaggagaaacatacctttggagagggggttttctttaaaactagtgttaagaaatgcttagggattttttttttcttatttttcataactaaagctttcacccagagccggctctgtttgcactttgctgccgacattgcaaactttttggcagggtgggagactgagtctcattctgtcamccaggctggagtgcagtngcccgatctcagctttactgcaacctct

SEQ ID NO: 165 - DNA, 1115 bp, Homo sapiens
  misc_feature (390): n equals a,t,g, or c
  misc_feature (394): n equals a,t,g, or c
aggaatgccgagtactgcaggggctccccagggagtatgtgaatgccaggcactgtttgccgtgccaccctgagtgtcagccccagaatggctcagtgacctgttttggaccggaggctgaccagtgtgtggcctgtgcccatcaagtggatggcgctggagtccattctccgccggcggttcacccaccagagtgatgtgtggagttatggtgtgactgtktgggagctgatgacttttggggccaaaccttacgatgggatcccagcccgggaggatccctgacctgctggaaaagggggagcggctgccccagccccccatctgcaccattgatgtctacatgatcatggtcaaatgttggatgattgactctgaatgtcggccaanattncgggagttggtgtktgaattctcccgcatggccagggacccccagcgctttgtggtcatccagaatgaggacttgggcccagccagtcccttggacagcaccttctaccgctcactgctggaggacgatgacatgggggacctggtggatgctgaggagtatctggtaccccagcagggcttcttctgtccagaccctgccccgggcgctgggggcatggtccaccacaggcaccgcagctcatctaccaggagtggcggtggggacctgacactagggctggagccykctgaaagaggaggcccccaggtctccactggcaccctccgaagggctggctccgatgtatttratggtgacctgggaatgggggcagccaaggggctgcaaagcctccccacacatgaccccagccctctacagcggtacagtgaggaccccacagtacccctgccctctragactgatggctacgttgcccccctgacctgcagcccccagcctgaatatgtgaaccagccagatgttcggccccagcccccttcgccccgagagggccctctgcctgctgcccgacctgctggtgccactctggaaaggsccaagactctctccccagggaagaatggggtcgtcaaagagtttttgcctttgggggtgccgtggagaaccccgagtattgacaccccaggggagggagcttgcccttcagccccacctt

SEQ ID NO: 166 - DNA, 1066 bp, Homo sapiens
  misc_feature (10): n equals a,t,g, or c
  misc_feature (739): n equals a,t,g, or c
  misc_feature (968): n equals a,t,g, or c
  misc_feature (1023): n equals a,t,g, or c
  misc_feature (1025): n equals a,t,g, or c
  misc_feature (1042): n equals a,t,g, or c
gggcacgagncacctgagccccttgtctcgcaccggctcccaggagggcacctccatggagggctcccgccccgctgcccctgccagagccaggcaccctcaagaccagtctggtggctactccaggcattgacaagctgaccgagaagtcccaggtgtcagaggatggcaccttgcggtccctggaacctgagccccagcagagcttggaggatggcagcccggctaagggggagcccagccaggcatggagggagcagcggcgaccgtccacctcatcagccagtgggcagtggagcccaacgccagagtgggtcctctcctggaagtcgaagctgccgctgcagaccatcatgaggctgctgcaggtgctggttccgcagtggagaagatctgcatcgacaagggcctgacggatgagtctgagatcctgcggttcctgcagcatggcaccctggtggggctgctgcccgtgccccaccccatcctcatccgcaagtaccaggccaactcgggcactgccatgtggttccgcacctacatgtggggcgtcatctatctgaggaatgtggacccccctgtctggtacgacaccgacgtgaagctgtttgagatacagcgggtgtgaggatgaagccgacgaggggctcagtctaggggaaggcagggccttggtccctgaggcttcccccatccaccattctgagctttaaattaccacgatcagggcctggaacangcagagtggccctgagtgtcatgccctagagacccctgtggccaggacaatgtgaactggctcagatccccctcaacccctaggctggactcacaggagccccatctctggggctatgccccaccagagaccactgcccccaacactcggactccctctttaagacctgggytcagtgctggcccctcagtgcccaccactcctgtgctacccagcccccagaggcagnaarccaatgggtcactgttgcccctaaaggggggtttttgaaccaagggggaaancnacggggcctggttcccntttggaaaggtttcccctgggaaa

SEQ ID NO: 167 - DNA, 657 bp, Homo sapiens
  misc_feature (278): n equals a,t,g, or c
  misc_feature (564): n equals a,t,g, or c
  misc_feature (597): n equals a,t,g, or c
  misc_feature (602): n equals a,t,g, or c
  misc_feature (635): n equals a,t,g, or c
gtcgcgagcgctgccgtcgggaggcgctccgaggttcgaggctgtgccccgcgaccccgccttcggcgctcggctcgcaggatggatcccgtacccgggacagactcggcgccgctggctggcctggcctggtcgtcggcctctgcacccccgccgcggggkttcagcgcgatctcctgcaccgtcgagggggcaccgccagctttggcaagagcttcgcgcagaaatctggctacttcctgtgccttagttctctgggcagcctagagaacccgcangagaacgtggtggccgatatccagatcgtggtggacaagagccccctgccgctgggcttctcccccgtctgcgamcccatggattccaaggcctctgtgtccaagaagaaacgcatgtgtgtgaarctgttgcccctkggarccamggacacggctgtgtttgatgtccggctgagtgggaagaccaagacagtgcctggataccttcgaataggggacatgggcggctttgccatctggtgcaagaaaggccaaggccccgaggccagttgcccaaagccccgangtcctcagcccgggacatgcaagggcttctctntggangcagccagccagcccaagttaagggcgggcctncttggaagccggacaagcgttc

SEQ ID NO: 168 - DNA, 1026 bp, Homo sapiens
  misc_feature (1011): n equals a,t,g, or c
ggcacgaggagagatggaggggcggcaggtgctggaggtcaagatgcaggtggagtacatgtcattcagcgcacacgcggacgccaagggcatcatgcagctggtgggccaggcagagccgkagagcgtgctgctggtgcatggcgaggccaagaagatggagttcctgaagcagaagatcgagcaggagctccgggtcaactgctacatgccggccaatggcgagacggtgacgctgcccacaagccccagcatccccgtaggcatctcgctggggctgctgaagcgggagatggcgcaggggctgctccctgaggccaagaagcctcggctcctgcacggcaccctgatcatgaaggacagcaacttccggctggtgtcctcagagcaagccctcaaagagctgggtctggctgagcaccagctgcgcttcacctgccgcgtgcacctgcatgacacacgcaaggagcaggagacggcattgcgcgtctacagccacctcaagagcgtcctgaaggaccactgtgtgcagcacctcccrgacggctctgtgactgtggagtccgtcctcctccaggccgccgccccttctgaggacccaggcaccaaggtgctgctggtctcctggacctaccaggacgaggagctggggagcttcctcacatctctgctgaagaagggcctcccccaggcccccagctgaggccggcaactcacccagccgccacctctgccctctcccagctggacagaccctgggcctgcacttcaggactgtgggtgccctgggtgaacagaccctgcaggtcccatccctggggacagaggccttgtgtcacctgcctgcccaggcagctgtttgcagctgaagaaacaaactggtctccaggctgtcttgcctttattcctggttagggcaggtggtcctagacagcagtttccagtaaaagctgaacaaaaaaaaaaaaaaaaaaaattgggggggggcccgttacccatttggcctttagngggggttttaaatta

SEQ ID NO: 169 - DNA, 774 bp, Homo sapiens
  misc_feature (730): n equals a,t,g, or c
  misc_feature (733): n equals a,t,g, or c
  misc_feature (754): n equals a,t,g, or c
ggcataaacatcgggtggtgttcagatcctgctgccggcagctcgaggctaggatggctggagatgtgagggcctttgtctcatcacatccgagcacagctcagcaagatgctcttagctagraaacagattttatgtgttaatgttaaaaattttgcagttatttatcttgtggatattacagaagtgcctgacttcaacaaaatgtatgagttatacgatccatgtactgtcatgtttttcttcaggaacaagcacatcatgattgacttggggactggcaacaacaacaagattaactgggccatggaggacaagcaggagatggtggacatcatcgagacggtgtaccgcggggcccgcaaargccgcggcctggtggtgtcccccaaggactactccaccaagtaccgctactgaggcgccctcagtctgcgcggataaatgtcgtggagccctttttgtatggaaacgttttaagctatttaaagcctttggaaaatacaggaagctccagggctggagcacctctgagatggaattgataacatggtcttaactcaccgaaataaacaagcacgtggtgagaggagcaggcctacttgtttgttctcaggaaacttaatgaatagattactgattttcctagtcaaagttaattcttacccttggagtaaaacgaaggtgtttatcctgtgagcctgtgcgttttgcatactgggttggtttnctngggcttcggtgacagcatatnccgcgagctgggctttaaca

SEQ ID NO: 170 - DNA, 402 bp, Homo sapiens
ggcacgagcggcggtggggcggacagccggggtgcgcacttgggcccccctggccatggcggcgaaggtggacctgagcacctccaccgactggaaggaggcgaaatcctttctgaagggcctgagtgacaagcagcgggaggaacattacttctgcaaggactttgtcaggctgaagaagatcccgacatggaaggagatggcgaaaggggtggctgtgaaggtggaggagcccaggtataaaaaggacaagcagctcaatgagaaaatctccctgctccgcagcgacatcaccaagctggaggtggacgccatcgtcaacgccgccaacagctccccgcccccgaggagcctaattaaagatcttcgttgtggcaaaaaaaaaaaaaaaaaaaaaaaaaa

SEQ ID NO: 171 - DNA, 796 bp, Homo sapiens
aggcatcggggacagccgctgcggcagactcgagccagctcaagcccgcagctcgcagggagatccagctccgtcctgcctgcagcagcccaaccctgcacacccaccatggatgtyttcaagaagggcttctccatcgccaaggagggcgtggtgggtgcggtggaaaagaccaagcagggggtgacggaagcagctgagaagaccaaggagggggtcatgtatgtgggagccaagaccaaggagaatgttgtacagagcgtgacctcagtggccgagaagaccaaggagcaggccaacgccgtgagcgaggctgtggtgagcagcgtcaacactgtggccaccaagaccgtggaggaggcggagaacatcgcggtcacctccggggtggtgcgcaaggaggacttgaggccatctgccccccaacaggagggtgaggcatccaaagagaaagaggaagtggcagaggaggcccagagtgggggagactagagggctacaggccagcgtggatgacctgaagagcgctcctctgccttggacaccatcccctcctagcacaaggagtgcccgccttgagtgacatgcggctgcccacgctcctgccctcgtctccctggccacccttggcctgtccacctgtgctgctgcaccaacctcactgccctccctcggccccacccaccctctggtccttctgaccccacttatgctgctgtgaattttttttttaaatgattccaaataaaacttgagcccactyctaaaaaaaaaaaaaaaaaaaaaaagggggccc

SEQ ID NO: 172 - DNA, 478 bp, Homo sapiens
aattcggcagagcctggttgcagggcagctaggggtctctgcattctccacatggtctcatgcccccttttgtcccctacaggaggacttgaggccatctgccccccaacaggagggtgaggcatccaaagagaaagaggaagtggcagaggaggcccagagtgggggagactagagggctacaggccagcgtggatgacctgaagagcgctcctctgccttggacaccatcccctcctagcacaaggagtgcccgccttgagtgacatgcggctgcccacgctcctgccctcgtctccctggccacccttggcctgtccacctgtgctgctgcaccaacctcactgccctccctcggccccacccaccctctggtccttctgaccccacttatgctgctgtgaattttttttttaaatgattccaaataaaacttgagcccactcctaaaaaaaaaaaaaaaaaaaaaaaaaaaaaa

SEQ ID NO: 173 - DNA, 656 bp, Homo sapiens
  misc_feature (59): n equals a,t,g, or c
tttcccaatgcctgccaccacggagactcagggccacctgccaccctccctcgctgccntctgcccttgggatggggcgctcctgaatgtacgtgggccccggtgtttacaaggaggtgatcatctacaacctctgccagaagcaggtggtggagaagataccactgcccttttttgccatgtccctgagcctgtcccccgggacccacctcctggctgttggctttgctgagtgcatgctgaggctggtagactgtgccatggggactgcccaagactttgccggccacgacaacgcagtgcacctgtgcaggtttacaccktccgccaggctgctcttcacggccgcccgcaacgagatccttgtgtgggaggtccccggcctctgagatgcagcagggactgtggtggtgggcatcaacgcctggtcatgccaggcacctggacacaggcttggcagaggcgccaggttgtcaatggcctcatgctgggacaggccaggattcacgtaaatcgcctggagcaagctgttgtaaatttggcgccctgtgaatactttcatacctgttgcccttttgcctaagaaatctttaatgtttctatcttgtaataaacatgggcatttattgcaaaaaaaaaaaaaaaaaaaaaaaaaa

SEQ ID NO: 174 - DNA, 1891 bp, Homo sapiens
gagccccctccgagaggggagaccagcgggccatgacaagctccaggctttggttttcgctgctgctggcggcagcgttcgcaggacgggcgacggccctctggccctggcctcagaacttccaaacctccgaccagcgctacgtcctttacccgaacaactttcaattccagtacgatgtcagctcggccgcgcasccggctgctcagtcctcgacgaggccttccagcgctatcgtgacctgcttttcggttccgggtcttggccccgtccttacctcacagggaaacggcatacactggagaagaatgtgttggttgtctctgtagtcacacctggatgtaaccagcttcctactttggagtcagtggagaattataccctgaccataaatgatgaccagtgtttactcctctctgagactgtctggggagctctccgaggtctggagacttttagccagcttgtttggaaatctgctgagggcacattctttatcaacaagactgagattgaggactttccccgctttcctcaccggggcttgctgttggatacatctcgccattacctgccactctctagcatcctggacactctggatgtcatggcgtacaataaattgaacgtgttccactggcatctggtagatgatccttccttcccatatgagagcttcacttttccagagctcatgagaaaggggtcctacaaccctgtcacccacatctacacagcacaggatgtgaaggaggtcattgaatacgcacggctccggggtatccgtgtgcttgcagagtttgacactcctggccacactttgtcctggggaccagktatccctgggattactgactccttgctactctgggtctgagccctctggcacctttggaccagtgaatcccagtctcaataatacctatgagttcatgagcacattcttcttagaagtcagctctgtcttcccagatttttatcttcatcttggaggagatgaggttgatttcacctgctggaagtccaacccagagatccaggactttatgaggaagaaaggcttcggtgaggacttcaagcagctggagtccttctacatccagacgctgctggacatcgtctcttcttatggcaagggctatgtggtgtggcaggaggtgtttgataataaagtaaagattcagccagacacaatcatacaggtgtggcgagaggatattccagtgaactatatgaaggagctggaactggtcaccaaggccggcttccgggcccttctctctgccccctggtacctgaaccgtatatcctatggccctgactggaaggatttctacgtagtggaacccctggcatttgaaggtacccctgagcagaaggctctggtgattggtggagaggcttgtatgtggggagaatatgtggacaacacaaacctggtccccaggctctggcccagagcargggctgttgccgaaaggctgtggagcaacaagttgacatctgacctgacatttgcctatgaacgtttgtcacacttccgctgtgagttgctgaggcgaggtgtccaggcccaacccctcaatgtaggcttctgtgagcaggagtttgaacagacctgagccccaggcaccgaggagggtgctggctgtaggtgaatggtagtggagccaggcttccactgcatcctggccaggggacggagccccttgccttcgtgccccttgcctgcgtgcccctgtgcttggagagaaaggggccggtgctggcgctcgcattcaataaagagtaatgtggcatttttctataataaacatggattacctgtgtttaaaaaaaaaaaaaaaaaaaaaaaaaaaaaaaaaaaaaaaaaaaaaaaaaaaaaaaaagg

SEQ ID NO: 175 - DNA, 2161 bp, Homo sapiens
  misc_feature (2153): n equals a,t,g, or c
  misc_feature (2160): n equals a,t,g, or c
cgcttccgtccacttggcgagtgagacgctgatgggaggatggacrtactggtgtctgagtgctccgcgcggctgctgcagcaggaagaagagattaaatctctgactgctgaaattgaccggttgaaaaactgtggctgtttaggagcttctccaaatttggagcagttacaagaagaaaatttaaaattaaagtatcgactgaatattcttcgaaagagtcttcaggcagaaaggaacaaaccaactaaaaatatgattaacattattagccgcctacaagaggtctttggtcatgcaattaaggctgcatatccagatttggaaaatcctcctctgctagtgacaccaagtcagcaggccaagtttggggactatcartgtaatagtgctatgggtatttctcagatgctcaaaaccaaggaacagaaagttaatccaagagaaattgctgaaaacattaccaaacacctcccagacaatgaatgtattgaaaaagttgaaattgctggtcctggttttattaatgtccacttaagaaaggattttgtatcagaacaattgaccagtcttctagtgaatggagttcaactacctgctctgggagagaataaaaaggttatagttgacttttcctcccctaatatagctaaagagatgcatgtaggccacctgaggtcaactatcataggagagagtataagccgcctctttgaatttgcagggtatgacgtgctcaggttaaatcatgtaggagactgggggacmcagtttggcatgctcatcgctcacctgcaagacaaatttccagattatctaacagtttcacctcctattggggatcttcaggtcttttataaggaatctaagaagaggtttgatactgaggaggaatttaagaagcgagcatatcagtgtgtagttctgctccagggtaaaaacccagatattacaaaagcttggaagcttatctgtgatgtctcccgccaagagttaaataaaatctatgatgcattggacgtctctttaatagagagaggggaatccttctatcaagataggatgaatgatattgtaaaggaatttgaagatagaggatttgtgcaggtggatgatggcagaaagattgtatttgtcccagggtgttccataccattaaccatagtaaaatcagatggaggttatacctatgatacatctgacctggctgctattaaacaaagactatttgaggaaaaagcagatatgattatctatgttgtggacaatggacaatctgtgcacttccagacaatatttgctgctgctcaaatgattggttggtatgaccctaaagtaactcgagtcttccatgctggatttggtgtggtgctaggggaagacaagaaaaagtttaaaacacgttcgggtgaaacagtgcgcctcatggatcttctgggagaaggactaaaacgatccatggacaagttgaaggaaaaagaaagagacaaggtcttaactgcagaggaattgaatgctgctcagacatccgttgcrtatggctgcatcaaatatgctgacctttcccataaccggttgaatgactacatcttctcctttgacaaaatgctagatgacagaggaaatacagctgcttacttgttgtatgccttcactagaatcaggtctattgcacgtctggccaatattgatgaagaaatgctccaaaaagctgctcgagaaaccaagattcttttggatcatgagaaggaatggaaactaggccggtgcattttacggttccctgagattctgcaaaagattttagatgacttatttctccacactctctgtgattatatatatgagctggcaactgctttcacagagttctatgatagctgctactgtgtggagaaagatagacagactggaaaaatattgaaggtgaacatgtggcgtatgctgctatgtgaagcagtagctgctgtcatggccaaggggtttgatatcctgggaataaaacctgtccaaaggatgtaatccttcataggtttgaacactgtgtgtttttaccaaagtgccattggcactgtttgcttttttacaatcatgtggacacaagcataagtaaagaaaatttgtcaaccagaaaaaaaaaaaaaaaaaaaaanaaaaaana

SEQ ID NO: 176 - DNA, 2411 bp, Homo sapiens
gggatcctggctaccactctgaatccgataccgcttctcttagaccgtcactgagacaacggttaccgtgacaaccgagcccgagaaccggagccttaccatcaaacttcggaaacggaagccagagaaaaaggtagaatggacaagtgacactgtggacaatgaacacatgggccgccgctcatcmaaatgctgctgtatttatgagaaacctcgggcctttggcgagagctccacggaaagtgatgaggaggaagaagagggctgtggtcatacacactgtgtacgtggccaccgcaaaggacggcgtcgtgcaaccctaggaccgacccccaccacccctccccagcctcctgacccttcccagccccctccagggccaatgcagcactaaatccctctctcctccagcattcctgtgtctgtctggccctaaatgtatccatgtggctacttctccagccccctccttccctctcttctgcctgatagagggaagaggaagaggaggacgaacagagatcctgaaattctgacttgctgctattccagaacccagcctcctgggtttccccagtcctcatttttcctcccaatacccacccttctctctcgagggatctaggcaccttggtcccagtgtcttccttttgttctcactgccaaactgcctgtcctgggatctagttatcttggccctgcactctcaacatgagtagcgaacacttaaattgggttttcaacagtcccagctttcactgccagggtcccagtcagattccaggaatttgcgccctaactttgcttgctaatcctggtttagagctatcccactaaaatatttaatcctaattcttagtccttgcctgtgagatatgaggtcttacaggagacctcagagctcccagcccttctcctcctgctaacccttctcacaccctcaagaggagttagaaaagaggtccttgtcattctcacctcttatggaaaatggaataagaaataatcatatcctttcttcccacccttctcctgttatttaggatttctgacaaagctggcttgagattggtcacttagagccgactgtctcctctgccttttgtttttcagcttcagagacagatccaatatagtcccagggacctgggtctctgggagaggaaggaagagggagggagcaaagagattggggtatgtcccctgtagtacactcttacctcttacttcctagactttgatttctccggcagcccagatgttcagttctcttggcccctctctaccccttactgggatctggttttcattttccggtccttttgccatacacagttacagagatcagtcaaatccataccaccactgagatctcatttattgccacagatgcacaaaataaataacccaaaatcacaaaatgtgttaaatatgggcccatttatacttatggggaagggtktkagactwtwcacaaggatgartttggaratktctgaagtattcccaggttkaggargagagaggggaaatagcaccattggttcctttccgtgagtatgtgcggggagaagtttcaagaaggttcttatggaaaaaaggctgtgagcatagaaagcagtcataggaggttggggaactagcttgtccctccccacccccagatcctgcaaaagaggtacaaagcttcccagaggccacagggccagaccagagtcaagcctcttgttttaggagaaacctcagtggacaggcagggtagcccagtccttagatctgtkgggaaggccctgagcccttctggagctaggagtggcaagagtgggagtcaagtatttgaccagcagagcctctatgtaggaatcatggtcactttaccaatactgatggggagggcctgttccccattgcaggcctagaatggtttgaatgggagaagtcaggaagtactgtagtagctgtaggggagagaagattctgagagccagaaggcmwsgaatggatttggttttgagcagggacgtggaaacgtggagaccaggtgaggtctcattattttggggcgaaaatgtgggttgctattaatactcctgcaatgggcgtgtgaatgtgttcccagaaatgagtggggaattccacccccaaaaagcagctgcagggccagtgscgggccaaacttctagttggagacgagactcagctttccgctggtacaatgcggacggagcacgagggtcgcaggtgcagaacagcgggaagatgcgctccccagggggccagggcctggaaggtaaagcaggtcgagtgagcggccgtcgtagagagccaccggccccgctcccagtccaggtccamgcgaaatgccgcggcgggggctcaacaccgcccagcagggtgggttcgggtgccgt

SEQ ID NO: 177 - DNA, 1338 bp, Homo sapiens
  misc_feature (1234): n equals a,t,g, or c
  misc_feature (1276): n equals a,t,g, or c
  misc_feature (1289): n equals a,t,g, or c
  misc_feature (1326): n equals a,t,g, or c
ggcacgagaaaaaactcagaaatgctaagtgtacttatttgttgaagaaacttgttacatattactaacatcttttttttttatgagaaatacttttcccataaccaaaaaattcagtgagcagaatggccttgcttgaggtttttgcaaatctctcgggtgtctggcttagtgggaggcagctgggccctcatacctgcctccgcacttcagctgtttgacataaacccagcttcgtgtgagtgaaagggaagggcctggggaccctcagaggttctcggaccacactttgagaactcctcgtctggaagacaggcctggggatgccatgtggggtgagggcttacgggcttggtgtcgctttgtggagaaccgctggtgtctgaagcgggtgtcagccccactgcaccttggtcttctgggctgtcctgatgccgaggcccacttcccagccatgctgactttgcctctttcccctcccagcagaaaaatggctacaaacttcctagcacatgagaagatctggttcgacaagttcaaatatgacgacgcagaaaggagattctacgagcagatgaacgggcctgtggcaggtgcctcccgccaggagaacggcgccagcgtgatcctccgtgacattgcgagagccagagagaacatccagaaatccctggctggaagctcaggccccggggcctccagcggcaccagcggagaccacggtgagctcgtcgtccggattgccagtctggaagtggagaaccagagtctgcgtggcgtggtacaggagctgcagcaggccatctccaagctggaggcccggctgaacgtgctggagaagagctcgcctggccaccgggccacggccccacagacccagcacgtatctcccatgcgccaagtggagcccccagccaagaagccagccacaccagcagaggatgacgaggatgatgacattgacctgtttggcagtgacaatgaggaggaggacaaggaggcggcacagttgcgggaggagcggytamggcaktacgcggagaagaaggccaagaagcytgcaytggtggccaagtcctccatcctgctggatttcaagccttggggatgatgagacggacatggctcagctggaggcctgtgtgcgctctatccagctggacggctggtctggggggcttccaagctggtgccctgggctacggttatccggaagctaacaatttcatgtgtngttggaggacgacaagtgggggacaacttgctggaggagganttcaccatttttnaggagcactgcaattttcaaatcgcatttttcaacanatttgaagcccg

SEQ ID NO: 178 - DNA, 1614 bp, Homo sapiens
  misc_feature (1213): n equals a,t,g, or c
tgcatgtggtacatcccttcttcctcatcctcttcatgtacttcarcggctgctttactgcctctaaagctgagagcttgattccagggcctgccctgctcctggtggcacccagtggcctgtactactggtacctggtcaccgagggccagatcttcatcctcttcatcttcaccttcttcgccatgctggccctcgtcctgcaccagaagcgcaagccctcttcctggacagcaacggcctcttcctcttctcctccttcgcactgaccctcttgcttgtggcgctctgggtcgcctggctgtggaatgaccctgttctcaggaagaagtacccgggtgtcatctacgtccctragccctgggctttctacacccttcacgtcagcagtcggcactgagtccctggcaccaggctctggcgctctgctgggtgggagggtgggccatggagggcatctgaatacaggagtagggggggtgtgggtgtgtaaccagagaccgagagcatgagtggggtgtgcctcgtgtgcgtggattcgtgtgtgtgtgtgtgtcttgtatatgtgtgcgcagagtgcatcattttcagactctactatttccgtcaagtttctgtttgatttggatcatctcaggatcggattctgttttagagtgtttctgggccaggatccgggcccctgccctcctctgcacctgaccacactccctactcagggctagtctgttcttcccggacatcttctggtagccgtgcaggagagggctgggtggggcagaggccaggaggggacctggtgtgtcacctgcccaccacctggctcatccctcaggcccaccctgaccctacattacataggttacgtcagcctactgtggctgttgagcaaagcatttctcctttctgggcctcatttgcactagatgggcctgtggtcccaaagtaggtcagtaggttggggttgctgacaccccttgggtgcagctttgggacagatgagtggctctgtcctgtcactgccctctccctgcctgggggctatgtgcactccagacccctgcccaggctcaggcccatgaggtatggagacaccctggcccccaggagctggaggcaccgcccactcccctggcattccagctttgcaggtgaccctcctctacccaaagctctgtccccctgctcccactccagaagaactgcggcacgngcttcgggcagcctagccacaggctttgagcgcctgcattcctgggggctggagggtggggtgccaaaggccctgagcaaaagccagagctcctctcatcaaagcctttacaaggtgctgggcccagaggctttgccttgacagagtggcccagggtttcaagggaggaggaacctccccctacctaggacccttcctgtggggggtctacagagtcagggacagaagggaagggacccacaggaagtcacagtggtgcccagggatgtgtcagcccccagccacggggacgcgggattcaagaatgaagtaaatacagtcacagccccaaaaaaaaaaaaaaaaaaaaaaaaaaaaaaaaaaaaaaaaaaaaaaaaaaaaaaaaaaaaaaaaaaaaaaaa

SEQ ID NO: 179 - DNA, 4292 bp, Homo sapiens
  misc_feature (654): n equals a,t,g, or c
  misc_feature (4288): n equals a,t,g, or c
ggaaggtccagagggggcaaacctctttatttaccaccttccacaggaatttggagaccaggacattctgcagatgttcatgccttttggaaatgttatctctgctaaagtcttcattgacaaacagaccaatctgagcaagtgctttggttttgttagctacgacaatccagtctctgcacaagctgctatccaagctatgaatggctttcagatcggcatgaaacgcttgaaggtgcagctgaagcgttccaaaaacgacagcaaaccttactgatcctaaccccagaggctccctgctctcattttagctttcttaggacatcttcatgcccgttagttcatcgtttgcctagcatgtccctgtggcgtctcaaaaaaaagtttcatcgtcccgtcattgtttctgatgtctttctgacctcacatcatatttggttctcctactgacctttgatctagtttgacctttgaaatttgcatgtgacctcatctagctatgaattctgggaagtcaatgtgaaaaacattgctgcattcatgcaagactgaaatttattattagacaaattcattatagaaaaaacctgtggcaaaaacgtttctttcttattttttttcttttcctaaaacagacttgaaagtattatacangggattggcattcttcccggtcactggtaacaatagcaatatgtgtccagggacacagaatgttggtttctaacagactacttccaaaaacagtttgagaaaaaaactgtctgattttaagtctctagaggtctgtaatagtttttacatttttcaggcagtgtaaagttttttgataaggccattttaggtggctcactttctcattaagatatatatatagaaccactttttgtagattagtataagaaaaatatttaccctgttttggggcaaatgctacctatttgtgtcaccttttgctgaactcacagttagacaatccatggtttaatgcacatgaaattacctatattttatactgtttcaatgtacaggagaaaggttactgtaaactgtgttatgttggtgcttctgtgaattaagttgtggtttcatcatgagtcttaatgttctttgttgataagacaagtttagaattggtttacttaatacaaaaaaaaaaaaaagaatttcaaaaaaaaaagttgtttgcttaaaaaaaatttcatgtgagggaaaaaaaaaaaacctattccagaataagttttgtgttggcttgtgaagcattgatgtcattttttttaattgtggactatttagatgtgtttgtgttcagcaaaatgtgatctgtttttttcttttaaagaaaaaaagtgaaaatatatagtgccaaattccaaaggtacttccttcctagagcttcagtgtgtttcttgtgagaagtaatttgataacatgggtattttattatgtgttttgtataaatccctaatatttaaaaaaaaaaacaaaacaaaaaaaggttacaaagtttgttaacttgctatcctgtggtcttgttgcctgaaattgttattgtttgttatttctctctgatgttttttgtaagacattgtataagtgcccatgtcccacttttttaaccactccgcacatcagtgctgtgaaggcaacctcaccatgtattttcttcataatctatggaaacctctaaggtgagaaagttttgaacttttaaccctttctacccagagctatctggaatgttgatgactttttatactgtcatgatttgagtttgttttggggtgtttccaatttggatttttttccctgcatctatcctctaagttgtttcggtttgactactttgttctttggttaagatccaaaagaaaacagaaaacaattccacgaggccaatctaaagggaaaaaatcctacactacttttactacttttgattatttctcatttttgggaaaagaattcctaatgtgctactagaattccttcttcagttttaacgagtaattggataaaccctgagggaaaacggaggtagattcagcacctaacaatcctgtatgcttttgagatcacgtttagtgctatgtcctagtctagaatattttcatataccttgcagtaaaacgactttgtggcaggacagtctcttgaggggttttgtttctgtttcctaaatactcctaaataatatttctaatcagccattatgctggggcatctctgatcccagtaggtacctctgaatataccaggtgtctggagttagaagcccatagccctttcccagcctttttggtttttttaattgaacacatttcatctaagtaaagctcagttctttatcacaatttactgaccaaatacctagcaccagttcctgctgccactttttaaagtgccatatgactttctacgaacaggtaccttgctgtcttgacaaatcctaatgtcacgcctacagccccaacacaagctccagtcttcctcttcggcatgccctggaagcttcttggcctcagctccccttccccgctcagcaccctgttaggatcagtgtgtgtggatgggatagccctgggatggaaaggactagcctctactgatgcaaaaaaacaaaaagcaacacaaacgtttccttcttatagcacatgcacttccttacaatgacatgatttgtattatcctcacatgtgtttactactgctggggccttccttcatcctctgagggctattttgtactttctgcagcaatcagcttaataacaacacttattgcacctgtctctctctgagaacacggtgtgtctcgacacgtaccacgtacgtggaaacacaagagcccaccacttgaatttctaagaccatttcattctgaaacttcttatcaattacctaaatctcaacgaaaaacaatttactgaagccgactcccctccccatctccctctcaacctcaacccacctgcatgcatctcccccagaggaaacactgagggtaggggacaggaggctcaggacgcgccctctgaatcgagtgtttcttcttcacaagtcaccaagagaggacatgagggggaaagtccttttttgcccttctccaaaaaataaccttccacagagacaaactgtccttctatccacttttatcttttaataaatatcaaaaggaaaaagctgcaagggtgcaaagggcctgtgccagaagaaaacacacacagggaaaccgctttttttaatcaattgtagagaatagtcatttttaatctaaattagagaattgtgatacaatggcagtcctcaaaggcgtaacgagttcatctttctttcaccataggggttatagttggcttgtgctactctggaatcattttactgtttgtttttattatcttaagtgctaattaaaaaaaaaaaaattttaaaaaaacctgtagtttcattacctttttgaataatgtcatacaaaaaatgtatttgtttttttgtgctgtgagaattgatgtttgtagattaataatcattttgtttagaattacaaaatagtttttaaatattgtctgagaaaagccaaagttaatgcaacctagtggaaactgtaagaccatttgagtattgtttgttttattgatgcatttggattttgttgtttgatggaatttgagccaaaaaaaaaatacgcaggctttcctatttctacaactgattgtacttatgcattttgtaccagtggaactttttatactggagattaaaaaaaaaatggaaatttttgtggcttgctctggtgggcccctgacaatgactgatttcaagtttgatttcgggttgattgattgattgattgatagaaagaaagttgcttttcttttgagaattaaaaactttggcttgatttcttttttccctttgcttatatctagcattagaattttgtcttaaaataacagcggtaagtttcactttttattctgtattgtgcagttacacaataaggtaattagatttagaagtactcagtcactttaagtggataaatgtattagttaaaactttagggtttgcttttttgctgtttagatcaaagttttttctgattcttctgtcctcattgtgaacataaccgtgtagttgaaacagtcaaacttatttttgtaatgtatgttattgtgtgatgcagttttttgcttctgtctccaatattaaaccattttcctaataaaaaaaaaaaaaaaaaaaaaaaaaaaaaaaaaaaaaaaaaaaaaaaaaaaaaaaaaaaaaanaaaa

SEQ ID NO: 180 - DNA, 243 bp, Homo sapiens
  misc_feature (235): n equals a,t,g, or c
tcgacccacgcgtccggagaaggtgggctctggggggtcctctgtgggcagcggggatgccagctcctcrcgccatcaccatcgccgccgccggttccacctrccccaacagcccctgctccagagggaagtgtggtgtgtgggcacaacgggaaacgctaaccaggcacagagctcaacggagcagacactgctgaagcccaagtgagaaaccacggcgctttggcgtgtaacntggaatat

SEQ ID NO: 181 - DNA, 813 bp, Homo sapiens
  misc_feature (266): n equals a,t,g, or c
  misc_feature (723): n equals a,t,g, or c
  misc_feature (726): n equals a,t,g, or c
  misc_feature (738): n equals a,t,g, or c
aattcggcagagaccaggtgtacctgagctacaataacgtctcctccttgaagatgcttgtggccaaggacaactgggtgctgtcctcggagatcagtcaggtccgcctgtacactctggaggatgacaagttcctctccttccacatggagatggtggtgcatgtggatgcagmccaggccttcctgctgctctcggacctgmgtcagaggccagagtgggacaagcactaccggagcgtggagctagtgcagcaggtagacranggacgacgccatctaccacgtcaccagmcctgmcctcggaggtcacacaaagccccaggacttcgtgatcctggcctcgaggcggaagccttgtgacaatggggacccctatgtcatcgcgctgaggtcggtcacgctgcccacacaccgagagacgccagagtacagacgcggagagaccctctgctcaggcttctgcctctggcgcgagggggaccagctgaccaaggtagcctgtagtagactcgggtcctgtccacagccctagctgccagcaatgctgtcctcacagaggcatagtcgcccccagctgggttgtgctccactgtgacggtggcccggggggaggatgccagcagcctgcctatggytgccagctgtgctgtgagcccagcagcatggcctgcatctgggaagggacacaggttgtccagagcccctggcacaactgctgagncanatgctgtggagncagctgttaccctgtaagccactggcccagcacctgcctacagggccagcctggtggccacagtgcacgtggggg

SEQ ID NO: 182 - DNA, 822 bp, Homo sapiens
  misc_feature (37): n equals a,t,g, or c
  misc_feature (49): n equals a,t,g, or c
  misc_feature (370): n equals a,t,g, or c
  misc_feature (567): n equals a,t,g, or c
ggttttacatgaccgcagtcgccctcagtttcacccngtaggaatcggnctggggatgcaccgtgctactctcttcctccaggccggtccccggcgcgtgcgcgcgatccatgtccatgtccgcgcctatcaataaagttgctcacttgttgccggcccgctagmccgaaaggttgcgcgcgcagmccgagaagtctcgcgatagccagccgcggctgcccttgcgcttcccgagctggcggggtccgtggtgcgggatcgagattgcgggctatggcgccgaagtttttcgtcagtactgggatatccccgatggcaccgattgccaccgcaaagcctacagcaccaccagtattgccagcgtcgctgncctgaccgccgctgcctacagagtcacactcaatcctccgggcaccttccttgaaggagtggctaaggttggacaatacacgttcactgcagctgctgtcggggccgtgtttggcctcaccacctgcatcagcgcccatgtccgcgagaagcccgacgaccccctgaactacttcctcggtggctgcgccggaggcntgactctgggagcacgcacgcacaactacgggattggcgccgccgcctgcgtgtactttggcatagcggcctccctggtcaagatgggccggctggagggctgggaggtgtttgcaaaacccaaggtgtgagccctgtgcctgccgggacctccagcctgcagaatgcgtccagaaataaattctgtgtctgtgtgtgaaaaaaaaaaaaaaaaaaaaaaaatygggggggggcccskaaccaattkcccttaag

SEQ ID NO: 183 - DNA, 1095 bp, Homo sapiens
  misc_feature (1082): n equals a,t,g, or c
  misc_feature (1094): n equals a,t,g, or c
gcgcggaggcggcggcggagcctcctcctgctgctgctgcgccccatccccccgcggccggccagttccagcccgcaccccgcgtcggtgcccgcgcccctccccgggccccgccatgggcctcaccgtgtccgcgctcttttcgcggatcttcgggaagaagcagatgcggattctcatggttggcttggatgcggctggcaagaccacaatcctgtacaaactgaagttgggggagattgtcaccaccatcccaaccataggcttcaatgtagaaacagtggaatataagaacatctgtttcacagtctgggacgtgggaggccaggacaagattcggcctctgtggcggcactacttccagaacactcagggcctcatctttgtggtggacagtaatgaccgggagcgggtccaagaatctgctgatgaactccagaagatgctgcaggaggacgagctgcgggatgcagtgctgctggtatttgccaacaagcaggacatgcccaacgccatgcccgtgagcgagctgactgacaagctggggctacagcacttacgcagccgcacgtggtatgtccaggccacctgtgccacccaaggcacaggtctgtacgatggtctggactggctgtcccacgagctgtcaaagcgctaaccagccaggggcaggcccctgatgcccggaagctcctgcgtgcatccccgggatgaccagactcccggactcctcaggcagtgccctttcctcccacttttcctcccccatagccacaggcctctgctcctgctcctgcctgcatgttctctctgttgttggagcctggagccttgctctctgggcacagaggggtccactctcctgcctgctgggacctatggaaggggcttcctggccaaggccccctcttccagaggaggagcagggatctgggtttccttttttttttctgttttgggtgtactctaggggccaggttgggagggggaaggtgagggcttcgggtggtgctataatgtggcactggatcttgagtaataaatttgctgtggtttgtaaaaaaaaaaaaaaaaaaccccgnggggggccccgna

SEQ ID NO: 184 - DNA, 3675 bp, Homo sapiens
  misc_feature (2204): n equals a,t,g, or c
  misc_feature (3329): n equals a,t,g, or c
gcgagaaccgcctggagagcctgcccccgcagatgcgccgcctggtgcacctgcagacgctcgtgctcaatggaaaccccctgctgcatgcacagctccggcagctcccagcgatgacggccctgcagaccctgcacctgcggagacccagcgcacccagagcaacctgcccaccagcctggagggtctgagcaacctcgcagacgtggatctgtcctgcaatgacctgacacgggtgcccgagtgtctgtacaccctccccagcctgcgccgcctcaacctcagcagcaaccagatcacggagctgtccctgtgcatagaccagtgggtgcacgtggaaactctgaacctgtcccgaaatcagctcacctcactgccctcagccatttgcaagctgagcaagctgaagaagctgtacctgaattccaacaagctggactttgacgggctgccctcaggcattggcaagctcaccaacctggaagagttcatggctgccaacaacaacctggagctggtccctgaaagtctctgcaggtgcccaaagctgaggaaacttgtcctgaacaagaaccacctggtgaccctcccagaagccatccatttcctgacggagatcgaggtcctggatgtgcgggagaaccccaacctggtcatgccgcccaagcccgcagaccgtgccgctgagtggtacaacatcgacttctcgctgcagaaccagctgcggctagcgggtgcctctcctgctaccgtggctgcagctgcagctgcgggagtgggcccaaggaccctatggctcgcaagatgcgactgcggaggcgcaaggattcagcccaggatgaccaggccaagcaggtgctgaagggcatgtcagatgttgcccaggagaagaacaaaaagcaggaggagagcgcagatgcccgggcccccagcggraaggtgcggcgttgggaccagggcctggagaagcccgccttgactactccgagttcttcacggaggacgtgggccagctgcccggactgaccatctggcagatagagaacttcgtgcctgtsctggtggaggaagccttccacggcaagttctacgaggctgactgctacattgtgctcaagacctttctggatgacagcggctccctcaactgggagatctactactggattggcggggaggccacactcgacaagaaagcttgctctgccatccacgctgtcaacttgcgcaactacctgggtgctgagtgccgcactgtccgggaggagatgggcgatgagagcgaggagttcctgcaggtgtttgacaacgacatctcctacattgagggtggaacagccagtggcttctacactgtggaagacacacactatgtcaccaggatgtatcgtgtgtatgggaaaaagaacatcaagttggagcctgtgcccctcaaggggacctctctggacccaaggtttgttttcctgctggaccgagggctagacatctacgtatggcggggggcccaggccacactgagcagcaccaccaaggccaggctctttgcagagaaaattaacaagaatgagcggaaagggaaggctgagatcacactgctggtgcagggccaggagctcccagagttctgggaggcactgggtggggagccctctgagatcaagaagcacgtgcctgaagacttctggccgccgcagcccaagctgtacaaggtgggcctgggcttgggctacctggagctgccacagatcaactacaagctctccgtggaacataagcagcgtcccaaggtggagctgatgccaagaatgcggctgctgcagagtctgctggacacgcgctgcgttaacattctggactgttggtccgacgtgttcatctggctcggccgcaagtccccgcgcctggtgcgcgctgccgccctcaagctgggtcaggagctgtgcgggatgctgcaccggccacgccatgccacggtcagccgcagcctcgagggcaccgaggcgcaggtgttcaaggccaagttcaagaattgggacgatgtgttgacggtggactacacacgcaatgcggaggccgtgctgcagagcccgggtctctccgggaaggtgaaacgcgacgccgagaagaaagaccagatgaaggctgacctcactgcgcttttcctgccgcggcagccgcccatgtcgctggccgaggcggancagctgatggaggagtggaacgaagacctagacggcatggagggtttcgtgctggagggcaagaagtttgcgcggctgccggaagaggagtttggccacttctacacgcaggactgctacgtcttcctctgcaggtactgggtgcctgtggagtacgaggaggaggaaaagaaggaagacaaggaggagaaggccgagggcaaagaaggcgaggaagcaaccgctgaggcagaggagaagcagccagaggaggacttccagtgcatcgtgtacttctggcagggccgtgaagcctccaatatgggctggctcaccttcaccttcagcctgcaaaagaagttcgagagcctcttccctgggaagctggaggtggtacgcatgacgcagcagcaggagaaccccaagttcctgtcccatttcaagaggaagttcatcatccaccggggcaagaggaaggcggtccagggcgcccaacagcccagcctctaccagatccgcaccaacggcagcgccctctgcacccggtgcatccagatcaacaccgactccagcctcctcaactccgagttctgcttcatcctcaaggttccctttgagagtgaggacaaccagggcatcgtgtatgcctgggtgggccgggcatcagaccctgacgaagccaagttggcagaagacatcctgaacaccatgtttgacacctcctacagcaagcaggttatcaacgaaggtgaggagcctgagaacttcttctgggtgggcattggggcacagaagccctatgatgacgatgccgagtacatgaaacacacacgtctcttccggtgctccaacgagaagggctactttgcagtgactgagaaatgctccgacttttgccaagatgacctggcagatgatgacatcatgttgctagacaatggccaagaggtctacatgtgggtggggacccagactagccaggtggagatcaagctgagcctgaaggcctgccaggtatatatccagcacatgcggtccaaggaacatgagcggccgcgccggctgcgcctggtccgcaagggcaatgagcagcacgcctttacccgctgcttccacgcctggagcgccttctgcaaggccctggcntaagacaggctggcacagccccaggcttggtgaggaagaggaaggggcctcatccactgtctgctagcaaagaatgtactcaggtgacaccacctgctccagccacgtccagtgccacagtccccagtagcctcaagcagcaccaatggggatgaccctgacaggtgccctcaggggtctgggaaatccaactctctccacagtgtgagtgcacgtgtgaagccccctcactcttccgctagggataaagcagatgtggatgccctttaagagatattaaatgcttttattttcaatattaaaaaaaaaaaaaaaaagggcggccsctcgcgatctagaactagtc

SEQ ID NO: 185 - DNA, 1040 bp, Homo sapiens
ggacagagcctccactgagctgctgcctgcccgccacatacccagctgacatgggcaccgcaggagccatgcagctgtgctgggtgatcctgggcttcctcctgttccgaggccacaactcccagcccacaatgacccagacctctagctctcagggaggccttggcggtctaagtctgaccacagagccagtttcttccaacccaggatacatcccttcctcagaggctaacaggccaagccatctrtccagcactggtaccccaggcgcaggtgtccccagcagtggaagagacggaggcacaagcagagacacatttcaaactgttccccccaattcaaccaccatgagcctgagcatgagggaagatgcgaccatcctgcccagccccacgtcagagactgtgctcactgtggctgcatttggtgttatcagcttcattgtcatcctggtggttgtggtgatcatcctagttggtgtggtcagcctgaggttcaagtgtcggaagagcaaggagtctgaagatccccagaaacctgggagttcagggctgtctgaaagctgctccacagccaatggagagaaagacagcatcacccttatctccatgaagaacatcaacatgaataatggcaaacaaagtctctcagcagagaaggttctttaaaagcaactttgggtccccatgagtccaaggatgatgcagctgccctgtgactacaaggaggaagagatggaattagtagaggcaatgaaccacatgtaaattattttattgtttcatgtctgcttctagatctaaaggacactagcattgccccagatctgggagcaagctaccaacaggggagactctttcctgtatggacagctgctgtggaaatactgcctgcttctcccacctcctcagagccacaggaaagaggaggtgacagagagagagcaaggaaagtgatgaggtggattgatactttctactttgcattaaaattattttctagcctgcaaaaaaaaaaaaaaaaaaaaaaaaaaaactcga

SEQ ID NO: 186 - DNA, 817 bp, Homo sapiens
  misc_feature (2): n equals a,t,g, or c
  misc_feature (26): n equals a,t,g, or c
  misc_feature (31): n equals a,t,g, or c
  misc_feature (76): n equals a,t,g, or c
ancagctatagatcatgacaggcaanggtanactgacagtacggtcggattcccgggtcsacccacgcgtccgcangagcggccgggtggcgggaggaaccgttacgggaactgaagttgcggattaagcctgatcaagatgacaacctcccaaaagcaccgagacttcgtggcagagcccatgggggagaagccagtggggagcctggctgggattggtgaagtcctgggcaagaagctggaggaaaggggttttgacaaggcctatgttgtccttggccagtttctggtgctaaagaaagatgaagacctcttccgggaatggctgaaagacacttgtggcgccaacgccaagcagtcccgggactgcttcggatgccttcgagagtggtgcgacgccttcttgtgatgctctctgggaagctctcaatccccagccctcatccagagtttgcagccgagtagggactcctcccctgtcctctacgaaggaaaagattgctattgtcgtactcacctccgacgtactccggggtcttttgggagttttctcccctaaccatttcaacttttttttggattctcgctcttgcatgcctcccccgtcctttttcccttgccagttccctggtgacagttaccagctttcctgaatggattcccggccccatccctcacccccaccctcactttcaatccgtttgataccatttggctccttttttggcagaacagtcactgtccttgtaaagttttttagatcaataaagtcagtggctttcaaaaaaaaaaaaaaaaaaaaaaaaaaaaaaaaaaa

SEQ ID NO: 187 - DNA, 1080 bp, Homo sapiens
ctgccctgctgctggaacaccgagccagcctgagcgctaaggaccaagacggctgggagcgctgcacgccgcggctactggggccaggtgcctggtggagctgctcgtggcgcacggggccgacctgaacgcaaagtccctgatggacgagacgccccttgatgtgtgcggggacgaggaggtgcgggccaagctgctggagctgaagcacaagcacgacgccctcctgcgcgcccagagccgccagcgctccttgctgcgccgccgcacctccagcgccggcagccgcrggaaggtggtgaggcgggtgagcctaacccagcgcaccgacctgtaccgcaagcagcacgcccaggaggccatcgtgtggcaacagccgccgcccaccagcccggagccgcccgaggacaacgatgaccgccagacaggcgcagagctcaggccgccgcccccggargaggacaaccccgaagtggtcaggccgcacaatggccgagtagggggctccccagtgcggcatctatactccaagcgactagaccggagtgtctcctaccagctgagccccctggacagcaccaccccccacaccctggtccacgacaaggcccaccacaccctggctgacctgaagcgccagcgagctgctgccaagctgcagcgacccccacctgaggggcccgagagccctgagacagctgagcctggcctgcctggtgacacggtgaccccccagcctgactgtggcttcagggcaggcggggacccacccctgctcaagctcacagccccggcggtggaggctcccgtggagaggaggccgtgctgcctgctcatgtgaggctgttgctcagcatgcaggggccctgtcgcgggcacagcccaaggctgcctccccacggtgcgtgccctggtgctgcgggtgcagcacggaaaccccggcttctactgtacaggacactggcccctctcaggtcagaagacatgcctggagggatgtctggctgcaaagactatttttatcctgcaactcttgataaagggctgttttgccatggaaaaaaaaaaaaaaaaaaaaaa

SEQ ID NO: 188 - DNA, 1286 bp, Homo sapiens
  misc_feature (1245): n equals a,t,g, or c
  misc_feature (1254): n equals a,t,g, or c
gcatgattcttgttttgtagagatgcaggctcaaaaagtaatgcatgtttcttcagcagaactgaattattcactgccatatgactctaaacaccaaatacgtaatgcctctaatgtaaagcaccatgactctagtgctcttggtgtatattcttacatacctttagtggaaaatccttatttttcatcatggcctccaagtggtaccagttctaagatgtctcttgatttacctgagaagcaagatggaactgtttttccttcttctctgktgccaacatcctctacatccctcttctcttattacaattcacatgattctttatcactgaattctccaaccaatatttcctcactattgaaccaggagtcagctgtactagcaactgctccaaggatagatgatgaaatcccccctccacttcctgtacggacacctgaatcatttattgtggttgaggaagctggagaattctcaccaaatgttcccaaatccttatcctcagctgtgaaggtaaaaattggaacatcactggaatggggtggaacatctgaaccaaagaaatttgatgactctgtgatacttagaccaagcaagagtgtaaaactccgaagtcctaaatcagaactacatcaagatcgttcttctcccccacctcctctcccagaaagaactctagagtccttctttcttgccgatgaagattgtatgcaggcccaatctatagaaacatattctactagctatcctgacaccatggaaaattcaacatcttcaaaacagacactgaagactcctggaaaaagtttcacaaggagtaagagtttgaaaattttgcgaaacatgaaaaagartatctgtaattcttgcccaccaaacaagcctgcagaatctgttcagtcaaataactccagctcatttctgaattttggttttgcaaaccgtttttcaaaacccaaaggrccaaggaatccaccaccaacttggaatatttaataaaactccagatttataataatatgggctgcaagtacacctgcaaataaaactactagaatactgctagttaaaataagtgctctatatgcataatatcaaatatgaagatatgctaatgtgttaatagcttttaaaagaaaagcaaaatgccaataagtgccagttttgcattttcatatcatttgcattgagttgaaaactgcaaataaaagtttgtcacttgagcttatgtacagaatgctatntggggaacncttttaggatgggttttatttttccatttttg

SEQ ID NO: 189 - DNA, 1738 bp, Homo sapiens
  misc_feature (1480): n equals a,t,g, or c
gcggcgccctcggagccaaaggcgcgcggcggacacggcggggccctcgcgcgcctggagacgatgccaaagctgcagggcttcgagttctggagccgcaccctgcgaggggcccgccacgtcgtggcccccatggtggaccagagcgagctggcctggaggctgctgagccggcgccacggggcacagctctgctacacgcccatgctgcatgcccaggtctttgtccgcracgccaactaccggaaggagaacctgtactgcgaggtgtgccccgaggaccggcccctcatcgtgcagttctgtgccaatgacccggaggtgtttgttcaggcggctctcctggctcaggattactgtgacgccattgacctgaacttgggctgcccacagatgatagccaagagaggtcactatggcgcctttctgcaggacgagtgggacctgctccaaagaatgattttgctggcccacgagaaactctctgttcctgtcacgtgcaaaatccgtgtcttcccggagattgacaagaccgtgagtacgcccagatgctggagaaggccggctgccagttgctgacggtgcacggacgcaccaaggagcagaaggggcccctgtcgggtgcagcgtcctgggagcatatcaaggctgtgcggaaggctgtggccatccctgtgtttgctaacgggaacatccagtgcctgcaggacgtggagcgctgcctccgggacacgggtgtgcagggcgtcatgagcgcagagggcaacctgcacaaccccgccctgttcgagggccggagccctgccgtgtgggagctggccgaggagtatctggacatcgtgcgggagcacccctgccccctgtcctacgtccgggcccacctcttcaagctgtggcaccacacgctgcaggtgcaccaggagctgcgagaggagctggccaaggtgaagaccctggagggcatcgctgctgtgagccaggagctgaagctgcggtgtcaggaggagatatccaggcaggagggagcgaagcccaccggcgacttgcccttccactggatctgccagccctacatccggccggggcccagggaggggagcaaggagaaggcaggtgcgcgcascaagcgggccctggaggaagaggagggtggcacggaggtcctgtccaagaacaagcaaaagaagcagctgaggaacccccacaagaccttcgacccctctctgaagccaaaatatgcaaagtgtgaccagtgtggaaacccaaagggcaacagatgtgtgttcagcctgtgccgcggctgctgcaagaagcgagcctccaaagagactgcagactgcccaggtcacggattgctttttaaaaccaaattggagaagtctctggcctggaaagaggcccagcctgagctgcaggagcctcagccagcagcacctggaacaccaggtggcttctccgaagtcatgggcagtgccctggnctgaaggcccacaacccccacccccaggactgctgctggagcctggacacgtcctacttaagaaaatgccttttactcagggaatctcctgctacttaatgtggaaagacacgcccatgtcccccttcgcccactctgggggcctggaaatgctgcagtggggagcaggccccaggctggacctgccctgtcctcagcacgcgtgtgcaaaagtgaacaataaatcatttcaaagatgaaaaaamaaaaaaaaaaaaa

SEQ ID NO: 190 - DNA, 1923 bp, Homo sapiens
  misc_feature (1829): n equals a,t,g, or c
  misc_feature (1875): n equals a,t,g, or c
  misc_feature (1910): n equals a,t,g, or c
agcacatcaaatgcccccactccaagtacgggtgcacgttcatcgggaaccaggacacttacgagacccacctggagacttgccgcttcgagggcctgaaggagtttctgcagcagacggatgaccgcttccacgagatgcacgtggctctggcccagaaggaccaggagatcgccttcctgcgctccatgctgggaaagctctcggagaagatcgaccagctagagaagagcctggagctcaagtttgacgtcctggacgaaaaccagagcaagctcagcgaggacctcatggagttccggcgggacgcatccatgttaaatgacgagctgtcccacatcaacgcgcggctgaacatgggcatcctaggctcctacgaccctcagcagatcttcaagtgcaaagggacctttgtgggccaccagggccctgtgtggtgtctctgcgtctactccatgggtgacctgctcttcagtggctcctctgacaagaccatcaaggtgtgggacacatgtaccacctacaagtgtcagaagacactggagggccatgatggcatcgtgctggctctctgcatccaggggtgcaaactctacagcggctctgcagactgcaccatcattgtgtgggacatccagaacctgcagaaggtgaacaccatccgggcccatgacaacccggtgtgcacgctggtctcctcacacaacgtgctcttcagcggctccctgaaggccatcaaggtctgggacatcgtgggcactgagctgaagttgaagaaggagctcacaggcctcaaccactgggtgcgggccctggtggctgcccagagctacctgtacagcggctcctaccagacaatcaagatctgggacatccgaacccttgactgcatccacgtcctgcagacgtctggtggcagcgtctactccattgctgtgacaaatcaccacattgtctgtggcacctacgagaacctcatccacgtgtgggacattgagtccaaggagcaggtgcggaccctcacgggccacgtgggcaccgtgtatgccctggcggtcatctcgacgccagaccagaccaaagtcttcagtgcatcctacgaccggtccctcagggtctggagtatggacaacatgatctgcacgcagaccctgctgcgtcaccagggcagtgtcaccgcgctggctgtgtcccggggccgactcttctcaggggctgtggatagcactgtgaaggtttggacttgctaacaggatccaggccaggctgtggtttcccctgaaccagccctggacctttctgagccaggctggccacatggggtggtctcggggtttctgcctgccccgtgggcataggtggacaggctctggcagccgggcagtgccctccccgtcccatgctcggcgagcctccctctactcggcactgtccttgctgcccagcccctctctgggtgccaggtacgacgcttgccccggcccaccctccatccccaccctccatccccaccctagatggagcgagggcctttttactcaccttttctaccgtttttagactgtatgtagatttggttacctcctggttgaaataaatgctccacagactgtggctgtgagtggggacagctcctcgggacaagggggctgtgtgtggccttgaggttggtgtgcacaggcactggctgctgtgagtgggggggcatggggcagtttcctttggtggaccccaggayttcggsccamtccggggsctcccctccctgctaggaggcacaccctcagaggagctgcaagcccgtggctgcctgctacatgccctgcttncacgtggctgcacgctgacacacccacattcaccaaacccacccgngccctgggacgcaaccacgccaggaggaggacacnggccgccgagagc

SEQ ID NO: 191 - DNA, 250 bp, Homo sapiens
ccaagtgtgttgatacattaagctatgagacatctaaaataatgaaacttggaacttagtggaacatgtacatgttttcagcatacttaaacccaaaaatcattaattttcagaacttaatcagtgcttttacatttgttttttcttttatgctagttggaaatggaggatgaaratacaattgrtgtgttccaacagcagacgggrggtgtctactgaaaagggaacctgcttctttactccagaactc

SEQ ID NO: 192 - DNA, 1902 bp, Homo sapiens
  misc_feature (1): n equals a,t,g, or c
  misc_feature (8): n equals a,t,g, or c
  misc_feature (19): n equals a,t,g, or c
  misc_feature (763): n equals a,t,g, or c
  misc_feature (1898): n equals a,t,g, or c
  misc_feature (1900): n equals a,t,g, or c
  misc_feature (1901): n equals a,t,g, or c
  misc_feature (1902): n equals a,t,g, or c
ngggacgntggtagaccancgcgtaccgctgagtcarattttggcatcaacttgaagggcccaaaaatcaaaggaggtgcggatgtttcagggggtgtcagtgccccaracatcagccttggtgaagggcatttragtgttaaaggttccgggggtgagtggaagggaccccaagtctcctctgctctcaacttggacacatctaagtttgctgggggccttcatttctcaggaccaaaggtggaaggaggtgtgaaaggaggtcagattggactccaggctcctgggctgagtgtgtctgggcctcaaggtcacttggaaagtggatctggaaaagtaacattccctaaaatgaagatccccaaatttaccttctctggccgtgagctggttggcagagaaatgggggtggatgttcacttccctaaagcagaggccagcatccaagctggtgctggagacggcgagtgggaagagtctgaagtcaaactgaaaaagtccaagatcaaaatgcccaagtttaatttttccaaacctaaagggaaaggtggtgtcactggctcaccagaagcatcaatttctgggtccaaaggtgacctgaaaagttcaaaggccagcctgggctctctggaaggagaggcagaggccgaagcctcttcaccgaaaggcaaattctccttatttaaaagtaagaagccacggcaccgctgcaaattcattcagtgatgaaagagagttctctggaccttccaccccgacgggnacgctggagtttgaaggtggggaagtgtctctggaaggtgggaaagttaaagggaaacacgggaagctgaaattcggtacctttggtggattggggtcaaagagcaaaggtcattatgaggtgactgggagcgatgatgagacaggcaagttacaggggagtggggtgtccctggcctctaagaagtcccgactgtcctcctcttctagcaatgacagtgggaataaggttggcatccagcttcccgaggtggagctgtcagtttccacaaagaaagagtagcaggcctttgtatgtgtgtacatatatatatatataacaaaacatcagccttgggtggtgtgttcctatataaactccaaagggaaacacaccgactgcctcagcaatcatgcaaagaccttgcctggcccggtggcaagcgctgaaaaaccgaccgcctgtaggctcctggaactatacagataggtaaagagttccaagttcgtccagcccatgtgcaaagtcaacagtatttgccttaagatttcatatatatatatttttttgcattgactgctgagagctcctgtttactaagcaagcttttgtgtttattatcctcatttttactgaacattgttagttttggggtaatggaaacccactttttcattgtaatgactttgggggcttttgttagtaagggtgggtggggtgatgggttgcagacggaggtcaggtcttcctctttcctgagactggatctgttcaaacagcaaacgcccacagatggcccagaggtggtggtagtcagggtgtgtgggtgtttttagggttctttagtgttgtttctttcacccaggggtggtggtcccagccagtttggtgctgacggtgagaggaaattagaatctgtttgcaaattgtccaacccaccccctcaacatgaggggcttccattttctgtgttttgtaagggaactgtttccttcatgccgccatgttcctgatattagttctgatttctttttaacaaatgttatcatgattaagaaaatttccagcactttaatggccaattaactgagaatgtaagaaaattgawgctgtacaaggcaaataaagckgttattaacctgaaaaaaaaaaaaanannn

SEQ ID NO: 193 - DNA, 560 bp, Homo sapiens
  misc_feature (20): n equals a,t,g, or c
  misc_feature (528): n equals a,t,g, or c
  misc_feature (535): n equals a,t,g, or c
  misc_feature (559): n equals a,t,g, or c
ttttgcttaaagctatttangtgacactatagaaggtacgcctgcaggtaccggtccggaattcccgggtcgacccacgcgtccggggttgcagacggaggtcaggtcttcctctttcctgagactggatctgttcaaacagcaaacgcccacagatggcccagaggtggtggtagtcagggtgtgtgggtgtttttagggttctttagtgttgtttctttcacccaggggtggtggtcccagccagtttggtgctgacggtgagaggaaattagaatctgtttgcaaattgtccaacccaccccctcaacatgaggggcttccattttctgtgttttgtaagggaactgtttccttcatgccgccatgttcctgatattagttctgatttctttttaacaaatgttatcatgattaagaaaatttccagcactttaatggccaattaactgagaatgtaagaaaattgatgctgtacaaggcaaataaagctgtttattaaccttgaaaaaaaaaaaaaaaaggggnggcccgncccattgccctagggggggttaant

SEQ ID NO: 194 - DNA, 590 bp, Homo sapiens
  misc_feature (589): n equals a,t,g, or c
  misc_feature (590): n equals a,t,g, or c
ctgcaggtaccggtccggaattccgggtcgcccacgcgtcaggcggcggcgatgaccttctgccggctgctgaaccggtgtggcgaggcggcgcggagcctgcccctgggcgccaggtgtttcggggtgcgggtctcgccgaccggggagaaggtcacgcacactggccaggtttatgatgataaagactacaggagaattcggtttgtaggtcgtcagaaagaggtgaatgaaaactttgccattgatttgatagcagagcagcccgtgagcgaggtggagactcgggtgatagcgtgcgatggcggcgggggagctcttggccacccaaaagtgtatataaacttggacaaagaaacaaaaaccggcacatgcggttactgtgggctccagttcagacagcaccaccactagagcgtgtggcacgccgggggtcccgcagcatcctgtgagcatttccgcggggaagctgagcacgtgaagctcgctggttctgtgcgaagggtattcctggtgctgaataaagggtgttgctgtcaagaaaaaaaaaaaaaaaaaaaaaaaaaaaaaaaaaaaaaaaaaaaaaaann

SEQ ID NO: 195 - DNA, 691 bp, Homo sapiens
  misc_feature (10): n equals a,t,g, or c
  misc_feature (579): n equals a,t,g, or c
  misc_feature (618): n equals a,t,g, or c
  misc_feature (639): n equals a,t,g, or c
  misc_feature (657): n equals a,t,g, or c
  misc_feature (672): n equals a,t,g, or c
attggcatcntctgaaagcgttttagacaggcagaatctctggtctcccctctctgcattccccacccagtgaatgaatgagaatctgcatttcttgagatcataagaatactgacatacagatgagataaaactcatgtgaatatcagttttaaggctggtggttcatttgttttggtcatattgagtcaggattgactaatgaactgtagaggttttgcattatgcaaatgctcttaatttcttgtattaggaattagacgctcccccccaagtcttaaataatgttttaatctgtatccttttattataagaagattagtaatattctacagataataacaacaactggtatagtatattttatttacattcttcattcttaggagaaaatgctgagaagcttctgcagttcaagcgttggttctggtcaatagtagagaagatgagcatgacagaacgacaagatcttgkttacttttggacwtcaagcccatcactgccagccagtgaagaaggattccagcctatgccctcaatcacaatawgaccaccagatgaccmacatcttcctactgnaaaatacttgcatttcttggactttaccttcccactctnttcctttaaacaggattcttnaaaccggaaattggttanctcgccatttagganccaaaaattttgggttttg

SEQ ID NO: 196 - DNA, 1772 bp, Homo sapiens
  misc_feature (2): n equals a,t,g, or c
  misc_feature (1749): n equals a,t,g, or c
  misc_feature (1769): n equals a,t,g, or c
gnataatgctggccattttgcctttctgacatttccttgggaatctgcaagaacctcccctttcccttcccmcaataagaccatttaagtgtgtgytaaacaactacrgaatactaaataaaaagtttggccaaaaccaaccatgaagctgcaaaggtgcttgctcttactstttcaaatttttgcaactctartgtctcacttttaaaggaacagcttgattgcaaaggagaaaatagataagcaatgaakttatctccaacttcctaaaggcttatgacttctaaaaagtgaatctatcagcattccacatcagatttaaagcatcaaatgcctgtgaaacagcaaagatggttgaagattgtgctcattatgtttgtggagtgctgattgattcacagtagataacgctggcagtaagagaaatcaaatgctaagagttgttgaagcagaaggcggctgattgttggtaagtcagtgcagttgcataagcagtgctgtcagaattggtttggtgcaggcaatagattttgccttcaagggttcctgtggatctcaggaaggcatcagtgttgattaacactcataactagggagtgastggtagttacttaagtaattgaccaaatggaaaaggggaagtaattaaggaaattggtaagtggaggtagtcaggargttctygtggtycttyacayagattttacagctttggstttcattttgtttagctaaagtcatggggacaactcttcaatttagaacttaagttgaattataaaaatgatggatataagtggtagctgtatctagtgaagtgtctgtcagtaagtgaaacattttttggtggtggcttatccacaaacagtttagttgtagaataaaacttatgagtgacatctggaaagtaaccatgctaagatggcaagcacactggaaacaattaggccacttggctttcttttgctgtattgttttataagcctactttacctcccagtcttggaaacaagttttagttttttattggtttggagactagagccaatagtataatgttctcaaaggaaacagacttgagttgttggattagaggaactaacccaacttatatgattttttttttgtttttgtcgtgtagttatggcactgtcttatttggaacatttgcaactagggataatacaacatttttaactctcatttgacaacctactactaatcacagaccacaagggtaatgaccaaatttatgtggtttttgcactccatagttgtcttagcccaatctttctatactcttacgattacttgggttaacgcytctgtgaggaccttctggctcttgagataccctaaatatttaagatatttagatatcttgaagatagtataggatatagagattgtaccaaataggaatataaggagtatgttaaaatgaccagatacctgtttgatagtttactgacctagcagatgtgtggaaaaggaatcagatcttgattcttctgggtttatactggttgtaaaacagaatgatacagaaaatgttttccttgtttaactggtagttgaacatagaacttgggtattatagatcacttttcactttttggaatgttttgtattgaaacttaataaaactttaacatggcaaaaaaaaaaaaaaaaaaaaaaaaaaaaaaaaaaaaaaaaaaaaaaaaaaaaaaaaaaaaaaaaaaaaaaaaaaaaaaaaaaaaaaaaganaaaaaaaaaagggggggccnccc

SEQ ID NO: 197 - DNA, 675 bp, Homo sapiens
  misc_feature (657): n equals a,t,g, or c
  misc_feature (671): n equals a,t,g, or c
acccacgcgtccggacttcctcttcgttaagtcggccttcccaacatggcgcagtctattaacatcacggagctgaatctgccgcagctagaaatgctcaagaaccagctggaccaggaagtggagttcttgtccacgtccattgctcagctcaaagtggtacagaccaagtatgtggaagccaaggactgtctgaacgtgctgaacaagagcaacgaggggaaagaattactcgtcccactgacgagttctatgtatgtccctgggaagctgcatgatgtggaacacgtgctcatcgatgtgggaactgggtactatgtagagaagacagctgaggatgccaaggacttcttcaagaggaagatagattttctaaccaagcagatggagaaaatccaaccagctcttcaggagaagcacgccatgaaacaggccgtcatggaaatgatgagtcagaagattcagcagctcacagccctgggggcagctcaggctactgctaaggcctgagagtttttgcagaaatggggcagagggacaccctttgggcgtggcttcctggtgatgggaagggtcttgtgttttaatgccaataaatgtgccagctgggcaraaaaaaaaaaaaaaaaaaaaaaaaaaaaaaaaaaaaaaaccccnggggggggcccggnaccc

SEQ ID NO: 198 - DNA, 557 bp, Homo sapiens
  misc_feature (451): n equals a,t,g, or c
  misc_feature (461): n equals a,t,g, or c
  misc_feature (464): n equals a,t,g, or c
  misc_feature (488): n equals a,t,g, or c
  misc_feature (492): n equals a,t,g, or c
  misc_feature (495): n equals a,t,g, or c
tttaggtgacacgtatagaaggtcgcctgcaggtaccggwccggaattccgggtcgacccacgcgtccgggaacacaagatgccgaagggaagaaggcgaaggggaagaaggtggccccggcccccgccgtcgtgaagaagcaggaggccaagaaggtggtcaacccgctgttcgagaagcggcccaagaacttcggcatcggtcaggacatccagcccaagcgggacctgacgcgcttcgtcaagtggccgcgctacatccggctgcagcggcacgcgcgatcctctacaagcggctgaaggtgccgcccgccatcaaccagttcacgcaggcgctggaccgccagacggccacgcagcttgcttgaagctggcgcacaattaccggcccgagacgaagcaggagaagaagcagcggttgttggcccgggcggagaagaaarcggccggncaaggggganttnccgaacaagcggsccccgttgttntcgnaancggggttgaaaacggttcaacaagttggttggagaacaagaaggcgccattggttcgttatt

SEQ ID NO: 199 - DNA, 2611 bp, Homo sapiens
  misc_feature (3): n equals a,t,g, or c
  misc_feature (2549): n equals a,t,g, or c
  misc_feature (2560): n equals a,t,g, or c
  misc_feature (2585): n equals a,t,g, or c
tcncgggtcgacccacgcgtccggcgaggagtaccttaccaacttggcccacatggacatcgacaaggactggaggccccgctgtacctcacccccgagggctggtccctcttcctccagcgctactaccaagtggtccacgaaggggcagaactcaggcacctcgacactcaggtccagcgctgtgaggacatcctgcagcagctgcaggccgtggtaccccagatagacatggaaggggatcgcaacatctggatcgtgaagccaggagccaagtcccgcggacgaggcatcatgtgcatggaccacctggaggagatgctgaagctggtgaacggcaaccccgtggtgatgaaggacggcaagtgggtggtgcagaagtatattgagcggcccctcctcatctttggcaccaagtttgacctcagacagtggttcctggtaactgactggaacccacttaccgtgtggttctaccgcgacagctatatccgcttttccacgcagcccttctccctgaagaacctggacaactcagtgcacctgtgcaacaactccatccagaagcacctggagaactcatgccatcggcatccactgcttccgccagacaacatgtggtctagccagaggttccaggcccacctgcaggagatgggtgccccaaatgcttggtccaccatcatcgtgcctggcatgaaggatgctgtgatccacgcacttcagacctcccaggacaccgtgcaatgtcggaaggccagctttgagctctatggcgctgacttcgtgttcggggaggacttccagccctggctgattgagatcaacgccagccccacgatggcaccctccacagcagtcactgcccggctctgtgctggcgtgcaagctgacaccctgcgcgtggtcattgaccggakgctggaccgcaactgtgacacaggagcctttgagctcatctataagcagcctgctgtggaggtgcctcaatatgtgggcatccggctcctggtagagggcttcaccatcaagaagcccatggcgatgtgtcatcggcggatgggggtccgccagcagtccctctgctgacccagcgaggctctggggaaggcaaggactcggggacccctacccacaggtcagcttctaggaaaggcactggggccaggagcctggggcacagtgagaagccagtctccactgccaccacttcagcccccggaaaggggaagaaagccgaggtatcaggaagtttaaggaagttgcccaaggttgcacagctcagaaggggcacagctgggatgcagacccagcccgtcaccacttccccagcctccacaccaaggcccagctgccttctccccatgtactccgacaccagggccaggtcctcagacgacagcacagcaagctggtgggcactaaggccctgtcgaccacaggcaaggccttgaggactctacccacggctaaggtcttcatttccctcccaccgaaccttgatttcaaggtggcacccagcatcctgaagccaagaaaggtgggcctcgacctgtgactcacacccagtggacagtgctgagcacggggtcagggctggagggcacaggcagagggcagctcccaggctggctggcaccccaagggaagagctggtctccctcagaagccccttcctccacagacttctgatcatctccctcttctcccctcctttcacaccgaggctcctgctctcctgtgcctccgaggcccccagctggaagtgccttgttgcctctgccctttgaagtcggaacaattcctagcacctgtcggaaggtcaaggccaaaggcaaattcaaggccagactgtgacaaacccagggctgaggcctgccccatgaagaggctgagccccctgaaacccctgccccttgttggtacattccagaggcgcaggggcctgggggatatgaagctagggaagcccctgcttcgattccccactgcccttgtcctggatccaacaccaaataaaaagaaacaagtgaagtatttggggcttgactccattgctgttggaggktcaagagtggatggggcgaggccgtgtaccccagggtccacagcaagagcctgaggccatcagcagytcytccgtgcagmgaggcccagaattcccacctaaggacagacatggggcttcctatttagggactcccccagcatctccgatccaggggtggggagcgtgaccttcactttacagatgaagaaactgagtctgaaagaggaggcatggcttacccaagatcacgtggcagtgagtcgacgcagggacatattgccagaactgccgagcactgggagccccccaaccccagagaacaagccaagctagcagaatgacacctaccgggcataggaacgttaatgccatgagacaagggaaggattkgcttgctaaamctcagcccttytgcagaaggcatkggtctatcccttcttcagcaaaggggcaaggtcactaaaaatgaacatccataagccacaaccactggagaaanttttgcactgnttagtgtagttggttgaatgtgggnccccggaaagagatgttacttggacc

SEQ ID NO: 200 - DNA, 2316 bp, Homo sapiens
  misc_feature (2280): n equals a,t,g, or c
  misc_feature (2282): n equals a,t,g, or c
  misc_feature (2302): n equals a,t,g, or c
ggcacgaggaaacatggagtcctgtaggcaaggtcttacctgaatcaggatgagggagtggtgggtccaggtggggctgctggccgtgcccctgcttgctgcgtacctgcacatcccaccccctcagctctcccctgcccttcactcatggaagtcttcaggcaagtttttcacttacaagggactgcgtatcttctaccaagactctgtgggtgtggttggaagtccagagatagttgtgcttttacacggttttccaacatccagctacgactggtacaagatttgggaaggtctgaccttgaggtttcatcgggtgattgcccttgatttcttaggctttggcttcagtgacaaaccgagaccacatcactattccatatttgagcaggccagcatcgtggaagcgcttttgcggcatctggggctccagaaccgcaggatcaaccttctttctcatgactatggagatattgttgctcaggagcttctctacaggtacaagcagaatcgatctggtcggcttaccataaagagtctctgtctgtcaaatggaggtatctttcctgagactcaccgtccactccttctccaaaagctactcaaagatggaggtgtgctgtcacccatcctcacacgactgatgaacttctttgtattctctcgaggtctcaccccagtctttgggccgtatactcggccctctgagagtgagctgtgggacatgtgggcagggatccgcaacaatgacgggaacttagtcattgacagtctcttacagtacatcaatcagaggaagaagttcagaaggcgctgggtgggagctcttgcctctgtaactatccccattcattttatctatgggccattggatcctgtaaatccctatccagagtttttggagctgtacaggaaaacgctgccgcggtccacagtgtcgattctggatgaccacattagccactatccacagctagaggatcccatgggcttcttgaatgcatatatgggcttcatcaactccttctgagctggaaagagtagcttccctgtattacctcccctactcccttatstgttgtgtattccacttaggaagaaatgcccaaaagaggtcctggccatcaaacataattctctcacaaagtccactttactcaaattggtgaacagtgtataggaagaagccagcaggagctctgactaaggttgacataatagtccacctcccattactttgatatctgatcaaatgtatagacttggctttgttttttgtgctattaggaaattctgatgagcattactattcactgatgcagaaagacgttcttttgcataaaagactttttttaacactttggacttctctgaaatatttagaagtgctaatttctggcccacccccaacaggaattctatagtaaggaggaggagaaggggggctccttccctctcctcgaatgacgttatgggcacatgccttttaaaagttctttaagcaacacagagctgagtcctctttgtcatacctttggatttagtgtttcatcagctgtttttagttataaacattttgttaaaatagatattggtttaaatgatacagtattttaggtatgatttaagactatgatttacctatacattatatatattttataaagatactaaaccagcatacccttactctgccagagtagtgaagctaattaaacacgtttggtttctgaataaattgaactaaatccaaactatttcctaaaatcacaggacattaaggaccaatagcatctgtgccagagatgtactgttattagctgggaagaccaattctaacagcaaataacagtctgagactcctcatacctcagtggttagaagcatgtctctcttgagctacagtagaggggaagggattgttgtgtagtcaagtcaccatgctgaatgtacactgattcctttatgatgactgcttaactccccactgcctgtcccagagaggctttccaatgtagctcagtaattcctgttactttacagacaggaaagttccagaaactttaagaacaaactctgaaagacctatgagcaaatggtgctgaatactttttttttaaagccacatttcattgtcttagtcaaagcaggattattaagtgattatttaaaattcgtttttttaaattagcaacttcaagtataacaactttgaaactggaataagtgtttattttctattaataaaaatgaattgtgacaaaaaaaaaaaaagggccngncccgttttaaaagggatccnaagctttaccgtac

SEQ ID NO: 201 - DNA, 1147 bp, Homo sapiens
  misc_feature (5): n equals a,t,g, or c
  misc_feature (6): n equals a,t,g, or c
  misc_feature (11): n equals a,t,g, or c
  misc_feature (12): n equals a,t,g, or c
  misc_feature (19): n equals a,t,g, or c
  misc_feature (1145): n equals a,t,g, or c
cgcannccacnnggtggangccgctctagaatatggatcccccgggactgcagggagtccaaggtacagtcgccgcgtgcggagcttgttactggttacttggcctcatggcggtccgagcttcgttcgagaacaactgtgagatcggctgctttgccaagctcaccaacacctactgtctggtagcgatcggaggctcagagaacttctacagtgtgttcgagggcgagctctccgataccatccccgtggtgcacgcgtctatcgccggctgccgcatcatcgggcgcatgtgtgtggggaacaggcacggtctcctggtacccaacaataccaccgaccaggagctgcaacacattcgcaacagcctcccagacacagtgcagattaggcgggtggaggagcggctctcagccttgggcaatgtcaccacctgcaatgactacgtggccttggtccacccagacttggacagggagacagaagaaattctggcagatgtgctcaaggtggaagtcttcagacagacagtggccgaccaggtgctagtaggaagctactgtgtcttcagcaatcagggagggctggtgcatcccaagacttcaattgaagaccaggatgagctgtcctctcttcttcaagtcccccttgtggcggggactgtgaaccgaggcagtgaggtgattgctgctgggatggtggtgaatgactggtgtgccttctgtggcctggacacaaccagcacagagctgtcagtggtggagagtgtcttcaagctgaatgaagcccagcctagcaccattgccaccagcatgcgggattccctcattgacagcctcacctgagtcaccttccaagttgttccatgggctcctggctctggactgtggccaaccttctccacattccgcccaatctgtaccggatgctggcagggaggtggcagagagctcactgggactgaggggctgggcacccaacccttttccacctgtgcttatcgcctggatctatcattactgcaaaaacctgctctgttgtgctggctggcaggccctgtggctgctggctgagggttctgctgtcctgtgccaccccattaaagtgcagttccctccggaaaaaaaaaaaaaaaaagggcggcnac

SEQ ID NO: 202 - DNA, 688 bp, Homo sapiens
  misc_feature (477): n equals a,t,g, or c
  misc_feature (684): n equals a,t,g, or c
acgtaccggtccggtaattcccgggtcgacccacgcgtccgctcggcgggcgctgttgagggagtcgggccgcgactgtggtcgtttttataccttcccgcgcggacgccggcgctgccaacggaagggcgggtaggacggagtttcgtcatgttggccaggcccatttgagatctttgaagatatcctcaacgtgaggctctgctgccatgaaggtgaagattaagtgctggaacggcgtggccacttggctctgggtggccaacgatgagaactgtggcatctgcaggatggcatttaacggatgctgccctgactgcaaggtgcccggcgacgactgcccgctggtgtggggccagtgctcccactgcttccacatgcattgcatcctcaagtggctgcacgcacagcaggtgcagcagcactgccccatgtgccgccaggaatggaagttcaaggagtgaggcccgacctggntctcgctggaggggcatcctgagactccttcctcatgctggcgccgatggctgctggggacagcgcccctgagctgcaacaaggtggaaacaagggctggagctgcgtttgttttgccatcactatgttgacacttttatccaataagtgaaaactcattaaactactcaaatcttaaaaaaaaaawaaawaaatctcggggggggncccg

SEQ ID NO: 203 - DNA, 304 bp, Homo sapiens
  misc_feature (269): n equals a,t,g, or c
  misc_feature (287): n equals a,t,g, or c
aaatgtgaaaactaaggccttgcaagcctatggttcacccaggggtaggatcaggcaccttaactctagagcccattctcctaaccactgagccatgattgtcttacaattttgaatactgcaaaactggaagaattgtctggctattatctaagctgttcataagctggaacaagtagatctgagggtaagaggagttctgttttaactaggactgagtttcaaatagagatgtttcagactatagagggggaaaaatggcckgggangtccataaatctaagccngtttcatggatgttttt

SEQ ID NO: 204 - DNA, 417 bp, Homo sapiens
  misc_feature (380): n equals a,t,g, or c
gggtcgacccacgcgtccgcgcgggcggggacggagctcggcgtgcttgctgctggagggtgatggccctgcaaggctgtgggctccgacctcaccgggagtcgamarcgagaggttcgccgaagagcgaggttctgggcgagcgctgaacgccggccccaagcaccccgggtctttacacagtccgcgtccacagactctgacgaagacgtggatctgctctcgctttagctgctcgcggtcctccagatcatgtccgcgactcctgcgactccgcgcggaaaaaaaagtttgccaggcgtggactcaatgacytttccaastgtgcgcctcgytgcctggaccggtttgagcgcggttgcccaagttgaactttttgnggggagggttttctctaagggctgttgtctcaatggg

SEQ ID NO: 205 - DNA, 551 bp, Homo sapiens
  misc_feature (450): n equals a,t,g, or c
  misc_feature (458): n equals a,t,g, or c
  misc_feature (471): n equals a,t,g, or c
  misc_feature (484): n equals a,t,g, or c
  misc_feature (519): n equals a,t,g, or c
gggtcgacccacgcgtccgactagttctagatcgcgagcggcccgccctttttttttttttttttttttttggtttccagagtttggctttattttgcagtacagaaatcatctggagccgtctgagacagacatccctgaagcggaggctctgtcaaatcaatactgcgtcgcacttrgtccgttgaggaagccacacctggggtacaaaagaagcttctacgtttacccgctgtaccacggatttctttcccctttgctcttaccaattttaccaggtgaaaacaccgcacagaggcttccctcggaatgacgctcgggtctggagttgggttagaattgtgggcccgcgtgacccccacctgtggctgtgttccgtggccctgtcctaaacagctgacgggacacagacgtagaggggcggggccacgcagggatgctgttcccaantcacggantatctggtgggcntcgcaatggccantgggacagatggcacgtgaaaggggccgttccggntctcaagcggcagaagcacaagaccgcggagg

SEQ ID NO: 206 - DNA, 1101 bp, Homo sapiens
  misc_feature (21): n equals a,t,g, or c
  misc_feature (479): n equals a,t,g, or c
tcccgggtcgacccacgcgtnccgcccgctggaggctggagcttccgggccctggaaaggggtccccgcgcgccccgggtcggaggcagacccctgggtttgggggacatgggcatttggggcgcctgaacccaagacctctggatgagctgccccgttcagaccatggatcctgaggtgaccttgctgctgcagtgccctggcgggggcctgccccaggagcagatacaggccgagctgagccccgcccatgaccgtcgcccactgccaggtggggacgaggccatcactgccatctgggagacccggctaaaggcccaaccctggctcttcgacgcccccaagttccgcctgcactcagccaccctggcgcctattggctctcgggggccacagctgctcctgcgcctgggccttacttcctaccgagacttcctgggcaccaactggtccagctcagctgcctggctgcgacasangggtgccaccgactggggtgacacgcaggcctatctggcggacccactgggggtgggcgctgcactagccacagccgatgacttccttgtyttcctgcgccgctcccggcaggtggctgaggcccctgggctggtggacgtacctggtgggcaccctgagcctcaggccctgtgccctggtggcagcccccagcaccaggacctcgctgggcagctggtggtacatgaactcttttccagtgtccttcaggagatctgtgatgaggtgaacctgccgctgctcaccctgagccagcccctgctgttkggcatcgcccgaaatgagaccagtgctggccgagccagtgccgagttctatgtccagtgcagcctgacttctgagcaggtgaggaagcactacctgagtgggggacccgaggcccacgagtctacaggaatcttctttgtggagacacagaacgtgcggagattgcccgagacggagatgtgggctgaactctgcccctcgccaaaggcgccatcatcctctacaaccgggttcagggaagtcccactggagcggccctagggtccccagccctactcccgccgctctgaaaataataaacgactttattcttgg

SEQ ID NO: 207 - DNA, 515 bp, Homo sapiens
  misc_feature (428): n equals a,t,g, or c
  misc_feature (439): n equals a,t,g, or c
  misc_feature (449): n equals a,t,g, or c
  misc_feature (456): n equals a,t,g, or c
  misc_feature (474): n equals a,t,g, or c
gggtcgacccacgcgtccgcccacgcgtccggcrgatagagcgccatgaaggcctcgggcacactgcgagaatacaaggtggtggggcgctgcctgcccacccccaaatgtcgcactccgccgctgtatcgcatgcgaatctttgcacctaatcacgtggtcgccaagtcccgcttttggtactttgtgtctcagctgaaaaagatgaagaagtcctcaggggaaatcgtctactgtggacaggtgtttgagaaatcccccttgcgagtgaagaacttcggcatctggctgcgctatgactcgagaagcggtacccacaacatgtaccggggagtaccggggacctgaccamcgcgggcgccgtcacccagtggttaccgagacatgggcgcccgacaccgttgcccgagcgcattcgattccagatncttgaagtggnaggagattgncagccancaattgccgccgggccancattcaagcatttccaaggattccaagatcaattcccattg

SEQ ID NO: 208 - DNA, 269 bp, Homo sapiens
aagcattgtgggtaaaggcctggaggcaggaaagtgaaggacaatttcaagaaactcagttcatcaattttcatcaacaccttcctgggccatgcctgggtactgagraacccagccctgaatctggacatcattttccctttcagagcatagaatgcagggggatccagggaatgggttaacagaagaggaagctggwtcaaggagacctttgcgtaccaggtgaaggtgtttgaactttgttcttgcaggcaggcagagcacggaca

SEQ ID NO: 209 - DNA, 734 bp, Homo sapiens
  misc_feature (278): n equals a,t,g, or c
  misc_feature (732): n equals a,t,g, or c
cgactggttgttaccgaggaagatggcggcgccagacccgaggcgctagggaagatcgcaccgcggacgcccgctgagcttggcgcacgggccgaccaggagctggtgactgccctcatgtgtgatttgcggcggccagcggcaggtgggatgatggacttggcctacgtctgtgagtgggagaaatggtccaagagcacccactgcccatcggtgcccctggcctgcgcctggtcctgccgaaatctcatcgccttcaccatggacctgcgcacgantgaccaggacctgacccgcatgatccacatcctggacacggagcacccctgggacctgcactcgatcccctcagagcaccacgaggccatcacctgcctggagtgggaccagtcaggctcccggctcctgtcagcagatgccgacgggcagatcaagtgctggagcatggcggaccacctggctaatagctgggagagctcagtgggcagcctagtggagggggaccccattgtggccctgtcctggctgcacaatggtgtgaaactggccctgcacgtggagaagtcgggcgcctccagcttcggggagaagttctcccgagtcaagttctcaccygttctcacgctgttcggcggcaagccatggagggctggatcgcggtgacggtcagcggcctggtcaccgtgtccctgctgwaascagcgggcaggtgctgacgtccaccgagagctntt

SEQ ID NO: 210 - DNA, 658 bp, Homo sapiens
  misc_feature (561): n equals a,t,g, or c
  misc_feature (567): n equals a,t,g, or c
  misc_feature (577): n equals a,t,g, or c
  misc_feature (580): n equals a,t,g, or c
  misc_feature (636): n equals a,t,g, or c
  misc_feature (654): n equals a,t,g, or c
cccgccagcgttgaggtttatcacgacagcctgtgccgaaaaatctggcgtgaggatgataaatggcatgtcatttttcgtgcagacggctgggagcaacatattaccgcccgctatctggtcggtgccgatggcgcaaactcgatggtgcggcgacatctctacccggatcatcaaatccgtaaatatgtcgctatccagcagtggttcgcggagaaacatccggtgccgttctactcctgcatctttgataattcgataactaactgttattcatggagtatcagcaaagacggktattttatctttggcggtgcctatccaatggaaagacggtcagacgsgtttcasgacgcttraagagaaaatgagcgcctttcagttccagtttggtaagacggtgaaaagcgaaaaatgcacgggtgctgtttccctcgcgctggcaggattttgtctgcggtaaggacaacgcctttcttgattggtgaacggcgggatttatcagcgccagctcgctggaagggattagctatgcgctggatagcacagacatttctgcgntcgtgntactgaacanccngagaagctcaataccgttactggcgcgccacccgaaactgggttaaactcttcggnaagatataaaaagccatnctga

SEQ ID NO: 211 - DNA, 204 bp, Homo sapiens
  misc_feature (91): n equals a,t,g, or c
  misc_feature (94): n equals a,t,g, or c
attcggagagccatctctgacagttagagccgatatcactggaagatattcaatcgtctctatgcttacgacctgcagatacagtctgttnttncacatgaagaaagtctcaagttgctgaagactgaattgtaagaaaaatctccagcccttctgtctgcagcttgagacttgaaccagagagtgtgagagctgctgttggag

SEQ ID NO: 212 - DNA, 1271 bp, Homo sapiens
  misc_feature (1222): n equals a,t,g, or c
ttccgcagccttgccccagcccactccccctctcaccctaccacagagcatggtaaataccaagcccgagaagacggaggaggactcagaggaggtgagggagcagaaacacaagaccttcgtggaaaaatacgagaaacagatcaagcactttggcatgcttcgccgctgggatgacagccaaaagtacctgtcagacaacgtccacctggtgtgcgaggagacagccaattacctggtcatttggtgcattgacctagaggtggaggagaaatgtgcactcatggagcaggtggcccaccagacaatcgtcatgcaatttatcctggagctggccaagagcctaaaggtggacccccgggcctgcttccggcagttcttcactaagattaagacagccgatcgccagtacatggagggcttcaacgacgagctggaagccttcaaggagcgtgtgcggggccgtgccaagctgcgcatcgagaaggccatgaaggagtacgaggaggaggagcgcaagaagcggctcggccccggcggcctggaccccgtcgaggtctacgagtccctccctgaggaactccagaagtgcttcgatgtgaaggacgtgcagatgctgcaggacgccatcagcaagatggaccccaccgacgcaaagtaccacatgcagcgctgcattgactctggcctctgggtccccaactctaaggccagcgaggccaaggagggagaggaggcaggtcctggggacccattactggaagctgttcccaagacgggcgatgagaaggatgtcagtgtgtgacctgccccagctaccaccgccacctgcttccaggcccctatgtgccccttttcagaaaacagatagatgccatctcgcccgctcctgacttcctctacttgcgctgctcggcccagcctggggggcccgcccagccctccctggcctctccactgtctccactctccagcgcccattcaagtctctgctttgagtcaaggggcttcactgcctgcagccccccatcagcattatgccaaaggcccgggggtccggggaagggcagaggtcaccaggctggtctaccaggtagttggggagggtccccagccaaggggccggctctcgtcactgggctctgttttcactgttcgtctgctgtctgtgtcttctatttggcaaacagcaatgatcttccaataaaagatttcagatgcnaaaaaaaaaaaaaaaaaaaaaaaaaaaaaaaacaaaaaaaaaaaaaaag

SEQ ID NO: 213 - DNA, 1025 bp, Homo sapiens
  misc_feature (991): n equals a,t,g, or c
  misc_feature (1007): n equals a,t,g, or c
  misc_feature (1019): n equals a,t,g, or c
cggacgcgtgggcgagcgtgatagccaacaggaaccgggagcggggtcccgggactgggaagaaacggcggccgggagggggctccggggaccatggggctcctgaccattctgaagaagatgaagcagaaagagcgggagctgcgactgctcatgcttggcctggacaatgctggaaagacaaccatcctgaagaagttcaatggggaggacatcgacaccatctccccaacgctgggcttcaacatcaagaccctggagcaccgaggattcaagctgaacatctgggatgtgggtggccagaagtccctgcggtcctactggcggaactactttgagagcaccgatggcctcatctgggtagtggacagcgcagaccgccagcgcatgcaggactgccagcgggagctccagagcctgctggtggaggagcgcctggccggagcaaccctcctcatctttgctaataagcaggacctgcctggagcactgtcctctaacgccatccgcgaggycctggagctggactccatccgcagccaccactggtgcatccagggctgcagcgccgtcaccggggagaacctgctgccgggcatcgactggctcctggatgacatttccagccgcattttcacagctgactgaaccactccagatgccccccacctagcagtccaggtccctcaaccttcaccaaacactacccatggggggttgggagtcagccggccaaactaacactccccctcctccaccccagcctgctgctgctactgctgcccgctgctgctctgtggccacccggctcccatggcgggagggctgtgccctggctgtctctctggctcctgacctggcctttggctaccataccaagaagagagggctgggcggggaggagctgctactgctgctaccgaggctgtgggcctcatccttcactcagttgtgaaataaaccgctccttgccccgmaaaaaaaaaaaaanaaaaaaaaaaaaaaancccggggggggncccgga

SEQ ID NO: 214 - DNA, 351 bp, Homo sapiens
  misc_feature (332): n equals a,t,g, or c
ggcacgagtraactatatacctcaaagaattagaaaaagaagaacaaactaagctcaaagttagcagaaggaaggaaatagtaaatattacagcagaagtaaagtagaggctagaaaaataataaaaaagatcaacaaaatggtatttgttctcatactatgataaagacatacttgagaaccgcattatttatggggaaaagaagtttaattgactcacagttccacaggctgtacaggaggcatggcttagggaggcctcagggaaacttagratccatggtggaaggtgkargaggaagcatgcaccatcttcactggccagagcaggnggagagagagcaaatttgg

SEQ ID NO: 215 - DNA, 1087 bp, Homo sapiens
  misc_feature (1075): n equals a,t,g, or c
gctggagtcccagtccacccgccacgcccgagcagggcctgtccgccttctacctctcctactttgacatgctgtaccctgaggacagcagctgggcagccaaggcccctggggccagcagtcgggaggagccacctgaggagcctgagcagtgcccggtcattgacagccaagccccagcgggcagcctggacttggtgcccggcgggctgaccttggaggagcactcgctggagcaggtgcagtccatggtggtgggcgaagtgctcaaggacatcgagacggcctgcaagctgctcaacatcaccgcagatcccatggactggagccccagcaatgtgcagaagtggctcctgtggacagagcaccaataccggctgccccccatgggcaaggccttccaggagctggcgggcaaggagctgtgcgccatgtcggaggagcagttccgccagcgctcgcccctgggtggggatgtgctgcacgcccacctggacatctggaagtcagcggcctggatgaaagagcggacttcacctggggcgattcactactgtgcctcgaccagtgaggagagctggaccgacagcgaggtggactcatcatgctccgggcagcccatccacctgtggcagttcctcaaggagttgctactcaagccccacagctatggccgcttcattaggtggctcaacaaggagaagggcatcttcaaaattgaggactcagcccaggtggcccggctgtrgggcatccgcaagaaccgtcccgccatgaactacgacaagctgagccgctccatccgscagtattacaagaagggcatcatccggaagccagacatctyccagcgsctcgtctaccagttcgtgcaccccatctgagtgcctggcccagggcctgaaacccgccctcaggggcctctctcctgcctgccctgcctcagccaggccctgagatgggggaaaacggcagtctgctctgctgctctgaccttcagagcccaaggtcaaggaggggcaaccaactgcccagggggatatgggtcctcttggggccttcgggaccctggggncaaggggctttc

SEQ ID NO: 216 - DNA, 1977 bp, Homo sapiens
  misc_feature (8): n equals a,t,g, or c
  misc_feature (11): n equals a,t,g, or c
  misc_feature (1873): n equals a,t,g, or c
cgcctgcnggnaccggtccggaattcccgggtcgacccacgcgtccggcagaagaagaggaggaggaagatgaggaagaggaggaagaagaggaggaggaggaggaagaagagcctcagcagcgagggcagggagagaagtcagccacgccctcacggaagattctggaccctaacactggggagccagctcccgtgctgtcctccccacctcctgcagacgtctccaccttcctggcttttccctctccagagaagctgctgcgcctagggcccaagagctccgtgctgatagcccagcagactgacacgtctgaccccgagaaggtggtctctgccttcctaaaggtgtcatctgtgttcaaggacgaagctactgtgaggatggcagtgcaggatgcagtagatgccctgatgcagaaggctttcaactcctcgtccttcaactccaacaccttcctcaccaggctcctcgtgcacatgggtctgctcaagagtgaagacaaggtcaaggccattgccaacctgtacggccccctgatggcgctgaaccacatggtgcagcaggactatttccccaaggcccttgcacccctgctgctggcgttcgtgaccaagcccaacagcgccctggaatcctgctccttcgcccgccacagtctgctgcagacgctgtacaaggtctagactcaaagcctctcccatcccttggcctggaccagtgagctggggagggactcggatgaactgaggcgcagcctacgccattgccttggacaggactctggccacaggcagggcgggtctgtgtcccatgtgtcctgtcagtcccctgagtatgtgtgtgggtgtggcgcatgtgcaggtctgtgcctcctgtcgggatttgggttttaacgtcttctgctggcccagccctgctctgttgtggggagttggcccccaggggaaagggctgtgagctgctccgccattaaactcacctccacctgagggcgctctgctgatctccgcctgggccctgatggccgtccccacccacctgccttccggcccggctccctggcggagcaraacccarggagttgcccgcgtgctgtccttcccctctgtgttgtgattgggttgtttcctgccctgcctggggctgcttctcgtcaccaagccctggtcctgcggcagctgtcacccctaccatccataccactgtgctgaccgctcagcctgaagagcagagaatgccatgggtgggactgtgggggtcggatcgtggggttgttggcagagggcaaccctgggccccacaccgtgtggacaggcagacaccagattgtccaggagcaggagctgctgggactgcgctggccccggacctagtgggccttctcctggctgctgagatgtcgtctgtgactggcctggctggagggggagtgttgacaacccaaagctgttctccagtctggggagggagaggcagggtccccaatgtccgagctgcatctggacgctgctcttaaaggacctcctggggcaggggagcggtagggtctggactgggcagatgctgtatgacctccctgagcacccgtgactgccccatgctttcccctttgtgctctgtgtgtgtctggctgtgcccgggggcttcacaaataaagtcgtgtggcagcttcagagactcagaaactctcactgaaagcgggatagtctcgggggccgttgtacgtggagtcccacctcggcagagcatgcggccccgcagcagtctgtggggcagtcagccctgcagaagggcccggcctcggcctcaggcactacctgggaagtggcagtcctgagtgggggcccattttcctgcctggscacacctnacccagcaccctgcctttgggctgcagctcgcttggcttctgcgttgctccttcactatggaagccacctcccttgggatcctttgctccactgccacatatgt

SEQ ID NO: 217 - DNA, 2815 bp, Homo sapiens
aattcccgggtcgacccacgcgtccgggcgcccgcgtctgagcccagagggctgtggagtgtcccggccggccccgagcacccccgcgctgtcggtcccccgctccggtctttcgctttggcttccaactagttaaatgcccttgagcgcgggtttccgcggcccggctcttcgcccccgcggcgcgagttgagccgtttccccgcgctgtccgcgcgggcgctccgacagcggctctgcagggtccgcggccagcgtccggccaccgctcggccgccactcaaggctcacgcgtcgatgtgtagctacatagttatctgtgtacatccacgctggggcatttttctcctgcttaatgaggacttgactcgggagcaagtgtgaatcattgccggggctgggaaaggaggaaggcgcatttaaccccctcccacccctctccatgtccgtgtgtcactcggctcggtccacctggcgcggccggtcctggggctgctgctgctgttgacgacgacgacgacgacgggggctgcctctgctgtcccgggagtttcctcctgctccggccacacagctcctggggattgttcctcttcgaaccagaacctcggcctgaccggcactttggctccaaaataactttatttttgggggagaaagcacatcacgaaccagtcaaaatcgtggtttatttctgtaacgtgaagacttctgctcttttttctttgtttgtttttttcgtaaacatctgggtgtatatcaaacggcaagatgtccagtaatgtcccggcggatatgataaatttgcgcctcattttggtaagcggaaaaacaaaagagttcctgttttctcctaacgattctgcttctgacattgcaaagcatgtatatgacaattggccaatggactgggaagaagagcaggtcagcagtccaaatattctacgacttatttatcaaggacgatttctacatggaaatgtcacattaggagcattaaaacttccttttggcaaaacaacagtgatgcatttggtggccagagagacattaccagagccaaactctcaaggtcagaggaatcgtgagaagactggagagagtaattgttgtgtaatcctgtaaacactgtctgcctagtgtgatgtgatatagtctttgtctttcatgctgctgggacagaaaagacccgacattgcttcagaaaccgttcagaacagtctgcctgtaaacacatggaactgaattaccacatgaacactgtcatcttttctcatgaaagtaaaaagaaccaagaacatttttcactctgattttttatttcttgtattttttgttgagctgttttaacacatattggtttttgaatgcagtcaatctccaggggaaaagttaacaagttatctttcgtagcagaaaccattttgctgccacaaaattttcatcatcagaactaataaatcaagtgttccaaatacaatttgcactaaaaagattggcattattttcctcatcagcagaatttataacagtgtgtggtatctagaaatacttatatatacaattccacactggaagacactcagcaattaatgaagttaattactgggccaacttgagaggaaaaaatggaaaagaaactaaaatgttgggtgaattctaccaaagtcagccgtggtggctgcactggcacagaatactaaactgagtgtgactattttcactgcaacaaatgaaaaaacaaaatgtgcctgtttaaagcactcagtagagggctgatgaaactaattttttttcctttaagacatgcactcttgagtcctacagtaactgagtgtttgtttagacagcacaagaaggggtgagagtgcgtctcctagccttaatgtgggagggtagtttcagtcactcatcggctttcattattgtgcrgaaatattagaaaacctcattgatcaattttatgtatttgaatatcagcaaattgaaattttccataattatcattaatttgtaaccacatccagtgtcatgcttactccttagagttcagatgaattcttaaaattaaaaaaaaactccatagtactaattttgkttctttatatagtttgcgtttgatattagtgcttgcaattgtattaaagtcaaaagctgatttttatggcatacacaagaatgccactttttcttttatttcataccaataatttaaagattgatatgctaaaaacaatttgcacagcactaaagcatgagctactttcatctaaacctgtaaaaatatgaaagatttttatattttttcactgggaagaaattcttcctggatgaaattacaaatatgtgtagaatatatttaataaaagacttataaaatacctaactacaggacttaaaatatagattggcgcgtagtatatagaacaatattccatataaataagtttagcctttataaaaatgaagttgcaggctgacattacattctgtacttactaagtgtcaacagcccttacaaacattaaatgtaaatggtttcaaatggtcagcgttgtttaaatgtaatcatgttattttattcattgttaatgctttgatgaaaaggctttatatgcagtagatctacgaaaatattgttcatactgatcagaattaaatttgtatagagcagagttttaaaatgaatgtaaatagcactaaacgttttctttctgcaacctgtacttacagattcttcctgtaaactaaataaaaaaaaaatgatagtgcaaaaaaaaaaaaaaagggcggccgctcgcgatctagaactagt

SEQ ID NO: 218 - DNA, 1645 bp, Homo sapiens
  misc_feature (347): n equals a,t,g, or c
  misc_feature (1643): n equals a,t,g, or c
gcccacgcgtccggagggcggggacaactgggtcttttgcggctgcagcgggcttgtaggtgtccggctttgctggcccagcaagcctgataagcatgaagctcttatctttggtggctgtggtcgggtgtttgctggtgcccccagctgaagccaacaagagttctgaagatatccggtgcaaatgcatctgtccaccttatagaaacatcagtgggcacatttacaaccagaatgtatcccagaaggactgcaactgcctgcacgtggtggagcccatgccagtgcctggccatgacgtggaggcctactgcctgctgtgcgagtgcaggtacgaggagcgcagnaccaccaccatcaaggtcatcattgtcatctacctgtccgtggtgggtgccctgttgctctacatggccttcctgatgctggtggaccctctgatccgaaagccggatgcatayactgagcaactgcacaatgaggaggagaatgaggatgctcgctctatggcagcagctgctgcatccctcgggggaccccgagcaaacacagtcctggagcgtgtggaaggtgcccagcagcggtggaagctgcaggtgcaggagcagcggaagacagtcttcgatcggcacaagatgctcagctagatgggctggtgtggttgggtcaaggccccaacaccatggctgccagcttccaggctggacaaagcagggggctacttctcccttccctcggttccagtcttccctttaaaagcctgtggcatttttcctccttctccctaactttagaaatgttgtacttggctattttgattagggaagagggatgtggtctctgatctcygttgtcttcttgggtctttggggttgaagggagggggaaggcaggccagaagggaatggagacattcgaggcggcctcaggagtggatgcgatctgtctctcctggctccactcttgccgccttccagctctgagtcttgggaatgttgttacccttggaagataaagctgggtcttcaggaactcagtgtctgggaggaaagcatggcccagcattcagcatgtgttcctttctgcagtggttctttatcaccacctccctcccagccccagcgcctcagccccagccccagctccagccctgaggacagctctgatgggagagctgggccccctgagcccactgggtcttcagggtgcactggaagctggtgttcgctgtcccctgtgcacttctcgcactggggcatggagtgcccatgcatactctgctgccggtcccctcacctgcacttgaggggtctgggcagtccctcctctccccagtgtccacagtcactgagccagacggtcggttggaacatgagactcgaggctgagcgtggatctgaacaccacagcccctgtacttgggttgcctcttgtccctgaacttcgttgtaccagtgcatggagagaaaattttgtcctcttgtcttagagttgtgtgtaaatcaaggaagccatcattaaattgttttatttctctcaaaaaaaaaaaaaaaaaaccaaaaaaaaaaaaaaaaaaaaaaaaaaaaaaaaaaaaaaaaaaaaaaaaaaaaaaaaaaaaaaaaaaaaaaaaaaaaaaaaaaaangg

SEQ ID NO: 219 - DNA, 478 bp, Homo sapiens
  misc_feature (344): n equals a,t,g, or c
  misc_feature (415): n equals a,t,g, or c
  misc_feature (452): n equals a,t,g, or c
  misc_feature (469): n equals a,t,g, or c
tcgacccacgcgtccggggaattcaaggagacgggggcgacgcggctgctggcgcctcctcgggtttggggctgccgccatcatgccggggatagtggagctgcctactctggaggatctgaaagtgcaggaggtgaaagtcagttcttcggtgctcaaagctgccgcccatcactatggagttcagtgtgacaagcccaacaaggagttcatgctctgccgctgggaagaaaaagacccccggcggtgtttagaggaaggcaagctcgtcaacaaktgtgctctggayttcttcaggcagataaagctttcactgtgcagagccttttacagactattggacntgcatcgactactccggcctgcagtgttttcgtcgctgccgcaaacagcaggccaatttgacgatgtgtgnggggcaactgggatggtgcggctgaactggggaaaangttccagtcaccaaatngaaaacagt

SEQ ID NO: 220 - DNA, 832 bp, Homo sapiens
attttagtagagacaaggtttcaccatgttggccaggctggtctcgaactcctggcctcaggtgatccacctgccttggcctcccaaagtgctccgattacaggtgkgagccacccggcccagcccctcccttgtgtttcaaccaatcggaagtgaatttaactagatgtagtaaccttttttttctttacttctaaaaaagttacagtttactaataaagttaagtctggttctgtcctagaggaaataaattcactattaattcatgtcttaagttacttgggttaaaacactttcagccacccagattaattaaagtggagcagtggagcccctggctgggagatggcctccagaggagcagctgcagggcaygttctgggcttagcgacagaggcaagcaagggactggtgtctctggtgagaggtgggtttgatgtatctctgtcctatgctggtctctcttctcctttataaaatcctctgtggtcaactgactactgcgtatcgcagtggaataagactgcacagttgctggtaggtgagtttaaagtcttaatctatgcattcagagaaatatttttatatgctttgtgtaatttataacaaggattttttttttagctttgttaactgtgaattcacccctcctcctccactgcatatttaaagcatgtgttcacactgtgtgtaaacattcactgaagattttttctttgtgcattgctgactgttcaaacataacaagtattattaaaattaaatattaactgacaaaaaaaaaaaaaaaaaactcgagggggggcccggtacccaattcgcccggagtag

SEQ ID NO: 221 - DNA, 1892 bp, Homo sapiens
  misc_feature (1892): n equals a,t,g, or c
tgactctgggctagagacctccccaacagagctgaggccaaggccgactccccctctcaaatggcgtggtctgggcctatgacggcccctgcagtggagtctgtactggctgcgggggaccctgctcatttgaaaatctgacatcagctgggcagtcgcccccctcctcctttcctccctctactctgacacagcacttagcacctgaatcttcgtttctctcccagggaccctccattttccatatccaggaaaatgtgatgcgccacaggtatcagcgtctggwtcgccacttcacgttttagccacaagtgactcagtggaagatccagagtcaacagaggctcgtcaggaagatgtctacagaaaaggtagaccaaaaggaggaagctggggaaaaagaggtgtgcggagaccagatcaaaggaccggacaaagaggaggaaccaccagctgctgcatcccatggccaggggtggcgtccaggtggcagagcagctaggaacgcaaggcctgaacctggggccagacaccctgctctcccggccatggtcaacgaccctccagtacctgccttactgtgggcccaggaggtgggccaagtcttggcaggccgtgcccgcagctgctgctgcagtttggggtgctcttctgcaccatcctccttttgctctgggtgtctgtcttcctctatggctccttctactattcctatatgccgacagtcagccacctcagccctgtgcatttctactacaggaccgactgtgattcctccaccacctcactctgctccttccctgttgccaatgtctcgctgactaagggtggacgtgatcgggtgctgatgtatggacagccgtatcgtgttaccttagagcttgagctgccagagtcccctgtgaatcaagatttgggcatgttcttggtcaccatttcctgctacaccagaggtggccgaatcatctccacttcttcgcgttcggtgatgctgcattaccgctcagacctgctccagatgctggacacactggtcttctctagcctcctgctatttggctttgcagagcagaagcagctgctggaggtggaactctacgcagactatagagagaactcgtacgtgccgaccactggagcgatcattgagatccacagcaagcgcatccagctgtatggagcctacctccgcatccacgcgcacttcactgggctcagatacctgctatacaacttcccgatgacctgcgccttcataggtgttgccagcaacttcaccttcctcagcgtcatcgtgctcttcagctacatgcagtgggtgtgggggggcatctggccccgacaccgcttctctttgcaggttaacatccgaaaaagagacaattcccggaaggaagtccaacgaaggatctctgctcatcagccagggcctgaaggccaggaggagtcaactccgcaatcagatgttacagaggatggtgagagccctgargatccctcagggacagagggtcagctgtccgaggaggagaaaccagatcagcagcccctgagcggagaagaggagctagagcctgaggccagtgatggttcaggctcctgggaagatgcagctttgctgacggaggccaacctgcctgctcctgctcctgcttctgcttctgcccctgtcctagagactctgggcagctctgaacctgctgggggtgctctccgacagcgccccacctgctctagttcctgaagaaaaggggcagactcctcacattccagcactttcccacctgactcctctcccctcgtttttccttcaataaactattttgtgtcagcttcaaaaaaaaaaaaaaaaaaaaaaaaaaaaaaaaaaaaaaaaaaaaaaaaaaaaaaan

SEQ ID NO: 222 - DNA, 868 bp, Homo sapiens
  misc_feature (1): n equals a,t,g, or c
  misc_feature (23): n equals a,t,g, or c
  misc_feature (31): n equals a,t,g, or c
  misc_feature (45): n equals a,t,g, or c
  misc_feature (829): n equals a,t,g, or c
  misc_feature (860): n equals a,t,g, or c
ntttcagcagttccgcatgcccntccgtggnaagcctgttcgtgntattgggcaagaacccccatgatgcccaaggccatccaagggcatctgaagaccaacccagctctggaaaacctgttacttcatatccgggggaatgtggctttgtgttcaccaaggaggcctcacttgagatcagggacatgctgctggccaataaggtgccagctgccgcccgtgctggtgccatagccccatgtgaggtcactgtgccagcccagaacactggtctggggcccgagaagacctccttcttccaggctttaggcatcaccactaaaatctccagaggaaccattgaaatcctgagtgatgtgcagctgattaagaccggagacaaagtgggagccagtgaagccacactgctgaacatgctgaacatctcccccttctcctttgggctgatcatccagcaggtgtttgacaatggcagcatctacaaccctgaagtgcttgacatcacagaggaaactctgcattctcgcttcctggagggtgtccgcaatgttgccagcgtatgtctgcagataggttacccaactgtggcatcagtgccccattctatcatcaatggatacaagcgggtcctggctttgtctgtggagactgattacacctttccacttgctgaaaaggtcaaggccttcttggctgatccatctgcatttgtggctgctgcccctgtggccgctgccaccactgctgcacctgctgctgctgcagccccagccaaagttgaagcaaaggaagagtcggaggaawcggatgagagkattktcamttcganaatcagcaaaagcaacaattccagccagttnattgtgaa

SEQ ID NO: 223 - DNA, 1516 bp, Homo sapiens
  misc_feature (1493): n equals a,t,g, or c
  misc_feature (1497): n equals a,t,g, or c
  misc_feature (1508): n equals a,t,g, or c
  misc_feature (1509): n equals a,t,g, or c
  misc_feature (1516): n equals a,t,g, or c
gaatgagcaggataactgtgtcctgattcatgatgtggaccaaaggaacagcgataaagatatctttggggatgcctgtgataactgcctgagtgtcttarataacgaccagaaagacaccgatggggatggaagaggagatgcctgtgatgatgacatggatggagatggaataaaaaacattctggacaactgcccaaaatttcccaatcgtgaccaacgggacaaggatggtgatggtgtgggggatgcctgtgacagttgtcctgatgtcagcaaccctaaccagtctgatgtggataatgatctggttggggactcctgtgacaccaatcaggacagtgatggagatgggcaccaggacagcacagacaactgccccaccgtcattaacagtgcccagctggacaccgataaggatggaattggtgacgagtgtgatgatgatgatgacaatgatggtatcccagacctggtgccccctggaccagacaactgccggctggtccccaacccagcccaggaggatagcaacagcgacggagtgggagacatctgtgagtctgactttgaccaggaccaggtcatcgatcggatcgacgtctgcccagagaacgcagaggtcaccctgaccgacttcagggcttaccagaccgtggtcctggatcctgaaggggatgcccagatcgatcccaactgggtggtcctgaaccagggcatggagattgtacagaccatgaacagtgatcctggcctggcagtggggtacacagcttttaatggagttgacttcgaagggaccttccatgtgaatacccagacagatgatgactatgcaggctttatctttggctaccaagatagctccagcttctacgtggtcatgtggaagcagacggagcagacatattggcaagccaccccattccgagcagttgcagaacctggcattcagctcaaggctgtgaagtctaagacaggtccaggggagcatctccggaactccctgtggcacacgggggacaccagtgaccaggtcaggctgctgtggaaggactccaggaatgtgggctggaaggacaaggtgtcctaccgctggttcctacagcacaggccccaggtgggctacatcagggtacgattttatgaaggctctgagttggtggctgactctggcgtcaccatagacaccacaatgcgtggaggccgacttggcgttttctgcttctctcaagaaaacatcatctggtccaacctcaagtatcgctgcaatgacaccatccctgaggacttccaagagtttcaaacccagaatttcgaccgcttcgataattaaaccaaggaagcaatctgtaactgcttttcggaacactaaaaccatatatattttaacttcaattttctttagcttttaccaacccaaatatatcaaaacgttttatgtgaatgtggcaataaaggagaagagatcatttttaaaaaaaaaaaaaaanttcnggggggcccgnnccaattn

SEQ ID NO: 224 - DNA, 1306 bp, Homo sapiens
  misc_feature (148): n equals a,t,g, or c
  misc_feature (887): n equals a,t,g, or c
  misc_feature (1242): n equals a,t,g, or c
  misc_feature (1264): n equals a,t,g, or c
  misc_feature (1303): n equals a,t,g, or c
gtccgcgcgggcctcggacctgggggccccccggacgtggacgggggcggcggcggggccccggactccgtcggcgcacatccccgtcccagcgcagagagccaccccaggaaaagcccggctggacgaggtcatggctgccgctgcnsttacaagcctgtccaccagccctctccttctgggggccccagttgcagccttcagcccagagcctggcctggagccctggaaggaggccctggtgcggcccccaggcagctacagcagcagcagcaacagtggagactggggatgggacctggccagtgaccagtcctctccgtccaccccgtcacccccactgccccccgaggcagcccactttctgtttggggagcccaccctgagaaaaaggaagagcccggcccaggtcatgttccagtgtctgtggaagagctgcgggaaggtgctgagcacggcgtcggcgatgcagagacacatccgcctggtgcacctggggaggcaggcagagcctgatcagagtgatggtgaggaggacttctactacacagagctggatgttggtgtggacacgctgaccgacgggctgtccagcctgactccagtgtcccccacggcctccatgccgcctgccttcccccgcctggagctgccagagctgctggagcccccagccctgcctagtcccctgcggccgcctgccccgcccctgcccccgccccctgtcctgagcaccgttgctaacccccagtcctgtcacagtgaccgtgtctaccagggctgcctgacgcccgcccgcctggagccgcagcccacggaggtcggagcctgcccacccgccttgtcctccaggatcggagtcaccctgaggaagccccgcggcgacnsaaagaagtgccggaaggtgtatggcatggagcgccgggacctctggtgcacagcctgccgctggaagaaagcctgccagcggttcctggactaagtccggctcgttcaagaacataagctaccaccttctccctccccaccccctccaggcccggggctgaaacagcccgaggrcagccccaggggctggccttcaccagctgcagggtctgcttttacttggggtgggggggcggggctgaccctgaaccctcccccccgccaggtcggggaggggtcccamcactcaaagtgcctctaaagaaaccagcttttttgcactaaaagccaaaacaaaacggtgttccctttagnccccaaggggccttgggggcanccaaccttcccgggcttgttggggcccgtaagatttttnttc

SEQ ID NO: 225 - DNA, 584 bp, Homo sapiens
  misc_feature (486): n equals a,t,g, or c
  misc_feature (542): n equals a,t,g, or c
  misc_feature (562): n equals a,t,g, or c
tcgacccacgcgtccggcgtcctctcggagcccgtgcggtcacttagccaagatgcctgaggaaacccagacccaagaccaaccgatggaggaggaggaggttgagacgttcgcctttcaggcagaaatygcscagttgatgtcrytgatcatcaayacyttctactcgaacaargagatcttcttgcgggactgatctccaactcgtccgacgctcyggacaaaatccgatacgagagcctgaccgaccccagcaagctcgactcggggaaggagctgcacattaacctcatcccgaacaagcaggaccggaccctcaccatcgtgggataccgggatcgcatgaccaaggccgacctgatcaacaacctgggcaccatcgccaaktcggggaccaaagcgttcatggaagytctgcaggcgggcgcagatatttcyatgattggccagttcggggtcgggttctattcggcctacttggtggcnagaaggtgacggtgatcaccaagcacaacgatgacgagcattacgcctgggagtcntccgcaggggctcgttcaangttccgcattgacacagtgaac

SEQ ID NO: 226 - DNA, 523 bp, Homo sapiens
  misc_feature (34): n equals a,t,g, or c
  misc_feature (498): n equals a,t,g, or c
  misc_feature (514): n equals a,t,g, or c
tcgacccacgcgtccgccagcagaaggctgttgngggacgtctgccaggactgcatccagatggtgacagacatccagactgctgtaaggaccaactccacctttgttgaagctttggtggaccatgccaaagcacagtgtgatctcctggggcccggcatggctgacatgtgcaagaactatatcaaccagtattcggacattgccgtccagatgatgatgcacatgcaacccaaagagatctgtggcctggttgggttctgcgaccaagtgaaggagatgcccatgcagactctgatccctgccaaagcggtctcagagaacgtcatccctgcattggaactggtggagcccattaagaaggacacggtccaggcaaagaccagtgttagctgtggagatatgcgagttacgtggttgaaggaagtggccaagctccattggacaacaacaggactgaggaagaaatagtttcaggcttggataaatgtgctccanttgccctaagtcctanctgaacatg

SEQ ID NO: 227 - DNA, 2377 bp, Homo sapiens
  misc_feature (2369): n equals a,t,g, or c
gccgatcccggagtcggagccgttccaggtctcgcagccgatctcgctacagccgctcgaagtctcggtcccgcactcgttctcgatctcggtcgacctccaagtccagatccgcacgaaggtccaagtccaagtcctcgtcggtctccagatctcgttcgcggtccaggtcccggtctcggtccaggagtcctcccccagtgtccaagagggaatccaaatccaggtcgcgatcgaagagtccccccaagtctcctgaagaggaaggagcggtgtcctcttaagaaaatggtaatgtctgggaatccgagacacataaccctaattcataaatgggatttggggtaggtctttttgagtcgtgttaatgtaagaatgactcctatcattaggagtgctgctcggaggttactcacctttgggagtaatactgaagagaggggtctgcagaaaggatgtgtatgaagcttagataataatggctgtttcgtaaactgtttgagacctattaatgaaaatgactatttcttgctgtttttatccaacgtctgcattttccccctttaaagctgcggtctcctgtttgataaaagaatattggccagtattgcagattttaactgatttggctgatcctccagggaccagtttctgtgggcgtgtattggarcaggtttgtctttaaatgttaaagatgcactatcctcttagagaaacaatcagttcaactattgttgtactgactgggacttcatattctaatggatgtggcaaaagaattgcaataagaagcagtgaacatttggaaccccaaaagaaagttacaggtattgcactgggtggggaaaggatagtgtgtctttaactcttaaattgtttggtcctattttttaaaaaggaaagggccctaagtagctcagatattaaagtagtattctcaattaccaaatgtttcatttgaaacaatttatcttaatgaaatatagaccaattctctgatctcgagttgtttttgtttggatacagcccttttttttttctttttttttcttccccttacctttcttcaccttggttatttggccaggaatacgtaaattcaaacttgtacatgctgatggtagcctttgtgaaattttcctaattgggccttttaaaaacatggctgggtggaacatttctgtaccctactggtttgaccagagccttagtaagtacgtgcctgaaactgaaaccatgtgcactttaatggaaggtaagctgaacttctttcttttcaaacctagatgtatcggcaagcagtgtaaacggaggacttggggaaaaaggaccacatagtccatcgaagaagagtccttggaacaagcaactggctattgaaaaggttattttgtaacatttgtctaactttttacttgtttaagctttgcctcagttggcaaacttcattttatgtgccattttgttgctgttattcaaatttcttgtaatttagtgaggtgaacgacttcagatttcattattggatttggatatttgaggtaaaatttcattttgttatatagtgctgactttttttgtttgaaattaaacagattggtaacctaatttgtggcctcctgacttttaaggaaaacgtgtgcagccattacacacagcctaaagctgtcaagagattgactcggcattgccttcattccttaaaattaaaaacctacaaaagttggtgtaaatttgtatatgttatttaccttcagatctaaatggtaatctgaacccaaatttgtataaagacttttcaggtgaaaagacttgattttttgaaaggattgtttatcaaacacaattctaatctcttctcttatgtatttttgtgcactaggcgcagttgtgtagcagttgagtaatgctggttagctgttaaggtggcgtgttgcagtgcagagtgcttggctgtttcctgttttctcccgattgctcctgtgtaaagatgccttgtcgtgcagaaacaaatggctgtccagtttattaaaatgcctgacaactgcacttccagtcacccgggccttgcatataaataacggagcatacagtgagcacatctagctgatgataaatacacctttttttccctcttccccctaaaaatggtaaatctgatcatatctacatgtatgaacttaacatggaaaatgttaaggaagcaaatggttgtaactttgtaagtacttataacatggtgtatctttttgcttatgaatattctgtattataaccattgtttctgtagtttaattaaaacattttcttggtgttagcttttctcagaaaaaaaaaaaaaaaaaaaaaaaaaaaaaaaaaaaaaaaangaaaaaag

SEQ ID NO: 228 - DNA, 463 bp, Homo sapiens
aatacatgccaaatggatcattaaatgaactcctacataggaaaactgaatatcctgatgttgcttggccattgagatttcgcatcctgcatgaaattgcccttggtgtaaattacctgcacaatatgactcctcctttacttcatcatgacttgaagactcagaatatcttattggacaatgaatttcatgttaagattgcagattttggtttatcaaagtggcgcatgatgtccctctcacagtcacgaagtagcaaatctgcaccagaaggagggacaattatctatatgccacctgaaaactatgaacctggacaaaaatcaagggccagtatcaagcacgatatatatagctatgcagttatcacatgggaagtgktatccagaaaacagccttttgaagatgtcaccaatcctttgcagataatgtatagtgtgtcacaaggacattggactggtat

SEQ ID NO: 229 - DNA, 1232 bp, Homo sapiens
caggtgagcatctgaacaaggggcagtcggccagggtgggcttgcgggagtccccaccttgacctctctcccttccagctgcccagagcccagaccaagcatggacgccgtggatgccaccatggagaaactccgggcacagtgcctgtcccgcggggcctcgggcatccagggcctggccaggtttttccgccaactagaccgggacgggagcagatccctggacgctgatgagttccggcagggtctggccaaactcgggctggtgctggaccaggcggaggcagagggtgtgtgcaggaagtgggaccgcaatggcagcgggacgctggatctggaggagttccttcgggcgctgcggccccccatgtcccaggcccgggaggctgtcatcgcagctgcatttgccaagctggaccgcagtggggacggcgtcgtgacggtggacgacctccgcggggtgtacagtggccgtgcccaccccaaggtgcgcagtggggagtggaccgaggacgaggtgctgcgccgcttcctggacaacttcgactcctctgagaaggacgggcaggtcacactggcggaattccaggactactacagcggcgtgagtgcctccatgaacacggatgaggagttcgtggccatgatgaccagtgcctggcagctgtgagcagctccggctcagccctgctgccctggcctgtcactycccacccctgccggagacctcccttccctgggccccttctcttctgggcagscacaccacagagcggggaggggcaggtgggggaatggaggctgcaggactggctagaccaggtccctgccggtccaccaggcggaggtgggacaaaggtcctaacaggagtcactggctcaggaccccagggagaaacgctctccccacccacgccatgctgaccagaggtcttgcagcccctgtggatgcccccgccgaggtcccccgatccccgcacccggactgctgctccctgcccctcccttgcgggtcccccaggaagccaggtgaccccaggtgggaggctgtgtgtggaggccatcctggaaggaagtttagacctgcccaggtgtggagcgaggggcacaggggcatcctaacctcagaaactgaaataaagcctttgaaaaaaaaatctgtaaaacatcaacccccaatcagaagatggcaaatggggaataaaaatagcaggtaacacgtcaaaaaaaaa

SEQ ID NO: 230 - DNA, 1063 bp, Homo sapiens
gcccacgcgtccgctcagcggctgccaacagatcatgagccatcagctcctctggggccagctataggacaacagaactctcaccaaaggaccagacacagtgggcaccatgggacagtgtcggtcagccaacgcagaggatgctcaggaattcagtgatgtggagagggccattgagaccctcatcaagaactttcaccagtactccgtggagggtgggaaggagacgctgaccccttctgagctacgggacctggtcacccagcagctgccccatctcatgccgagcaactgtggcctggaagagaaaattgccaacctgggcagctgcaatgactctaaactggagttcaggagtttctgggagctgattggagaagcggccaagagtgtgaagctggagaggcctgtccgggggcactgagaactccctctggaattcttggggggtgttggggagagactgtgggcctggaaataaaacttgtctcctctaccaccaccctgtaccctagcctgcacctgtccwcatctctgcaaagttcagcttccttccccaggtctctgtgcactctgtcttggatgctctggggagctcatgggtggaggagtctccaccagagggaggctcaggggactggttgggccagggatgaatatttgagggataaaaattgtgtaagagccaaagaattggtagtagggggagaacagagaggagctgggctatgggaaatgatttgaataatggagctgggaatatggctggatatctggtactaaaaaagggtctttaagaacctacttcctaatctcttccccaatccaaaccatagctgtctgtccagtgctctcttcctgcctccagctctgccccaggctcctcctaractctgtccctgggctagggcaggggaggagggagagcagggttgggggagaggctgaggagagtgtgacatgtggggagaggaccagctgggtgcttgggcattgacagaatgatggttgktttggatcatttgattaataaaaaaaaatgaaaaaagtgaaaaaaaaaaaa

SEQ ID NO: 231 - DNA, 1063 bp, Homo sapiens
  misc_feature (1056): n equals a,t,g, or c
  misc_feature (1061): n equals a,t,g, or c
  misc_feature (1063): n equals a,t,g, or c
gatcaccaccagggagcagaatccgttccagggattggggtgagtccgacttcgagcagcagctgccccccaacatcatgtacccagcccgtgactacgtggagccctgggcttcgcgtagagtccctagacggggcgaaaacgggaaaaggggccttaactggggcacctggctcctttgggagctcggagtttctgactggcctgcgcaacacctcagaggcaaggkgaacgcgagggcctataatgcaagaaccaaggcgagtcacgccctgtctgggcaaaagaggagtaaagacccctcagctgcagcccggcagcgcattcctacccagggtccgccgccagagctttcccgcgcggtcggatagttacactactgtccgggacttcctagccgtgccgcggaccatctcaagtgcttccgccacactcatcatggcggtggcagtaagtcacttccgcccgggaccggaartgtgggatactgcgagtatggcggcgtcaaaggtgaagcaggacatgcctccgccggggggctatgggcccatcgactacaaacggaacttgccgcgtcgaggactgtcgggctacagcatgctggccatagggattggaaccctgatctacgggcactggagcataatgaagtggaaccgtgagcgcaggcgcctacaaatcgaggacttcgaggctcgcatcgcgctgttgccactgttacaggcagaaaccgaccggaggaccttgcagatgcttcgggagaacctggaggaggaggccatcatcatgaaggacgtgcccgactggaaggtgggggagtctgtgttccacacaacccgctgggtgccccccttgatcggggagctgtacgggctgcgcaccacagaggaggctctccatgccagccacggcttcatgtggtacacgtaggccctgtgccctccggccacctggatccctgcccctccccactgggacggaataaatgctctgcagacctgaaaaaaaaaaaaaaaaaaaaaaaaaaaaaaaaaaaaaaaaaaaaaaaaaaaaaanaaaanan

SEQ ID NO: 232 - DNA, 1474 bp, Homo sapiens
  misc_feature (1337): n equals a,t,g, or c
  misc_feature (1359): n equals a,t,g, or c
  misc_feature (1377): n equals a,t,g, or c
ggattcctaccctcatcacggcctttgtccttgctacctctcaggcccaagctggatggctgcaacatgattatggccacctgtctgtctacagaaaacccaagtggaaccaccttgtccacaaattcgtcattggccacttaaagggtgcctctgccaactggtggaatcatcgccacttccagcaccacgccaagcctaacatcttccacaaggatcccgatgtgaacatgctgcacgtgtttgttctgggcgaatggcagcccatcgagtacggcaagaagaagctgaaatacctgccctacaatcaccagcacgaatacttcttcctgattgggccgccgctgctcatccccatgtatttccagtaccagatcatcatgaccatgatcgtccataagaactgggtggacctggcctgggccgtcagctactacatccggttcttcatcacctacatccctttctacggcatcctgggagccctccttttcctcaacttcatcaggttcctggagagccactggtttgtgtgggtcacacagatgaatcacatcgtcatggagattgaccaggaggcctaccgtgactggttcagtagccagctgacagccacctgcaacgtggagcagtccttcttcaacgactggttcagtggacaccttaacttccagattgagcaccacctcttccccaccatgccccggcacaacttacacaagatcgccccgctggtgaagtctctatgtgccaagcatggcattgaataccaggagaagccgctactgagggccctgctggacatcatcaggtccctgaagaagtctgggaagctgtggctggacgcctaccttcacaaatgaagccacagcccccgggacacygtggggaaggggtgcaggtggggtgatggccagaggaatgatgggcttttgttctgaggggtgtccgagaggctggtgtatgcactgctcacggaccccatgttggatctttctccctttctcctctcctttttctcttcacatctcccccatagcaccctgccctcatgggacctgccctccctcagccgtcagccatcagccatggccctcccagtgcctcctagccccttcttccaaggagcagagaggtggccaccgggggtggctctgtcctacctccactctctgcccctaaagatgggaggagaccagcggtccatgggtctggcctgtgagtctccccttgcagcctggtcactaggcatcacccccgctttggttcttcagatgctcttggggttcatargggcargtcctagtcggggcarggcccctgaccctcccggcttngcttaaatctccctgaacggtngcaattggtccacctttncataaaaaaggctgcttgttacaaagttcgggttttccttcctgcaactcggttaataaccgaaggctctcttaagatgttcaagggcccaaggccg

SEQ ID NO: 233 - DNA, 1782 bp, Homo sapiens
  misc_feature (8): n equals a,t,g, or c
  misc_feature (31): n equals a,t,g, or c
  misc_feature (34): n equals a,t,g, or c
  misc_feature (591): n equals a,t,g, or c
  misc_feature (1760): n equals a,t,g, or c
aagatganaggctcaccctaaaacatcttcnttnctctaccagtgagactatcaaccatggatctatctatctattttttaagcctgcatcacttcttgagataatgaggtttctacctccaaagcctgctgggtgagcaccttgctcattatactggwtctgaatttacctctttgaagtttctagatgcaccacttcctgctcacagcctggaattcggttaacaagtcagtgtcaacctacctttcccttcatgatttatagacttttgggagtaccttctggtagcttttgtcttcccataggaaagaggcccaatcccagtttgtcctcacaaagcggccagctccgtgatatctcttttgcgggcagagttaagattgtacacagatccccacaagtaccacgrtttttgcctcaggaaggataaagcacatgtttgtttctgctttcgttttcttttttctttttttcasgaagccttatggagaagtatgtttctgctttctttcctgrggaagcctagyttctgggccacgggactgatcctgtctacatcctctttccctccattctccatcgtgtctctncccccgtctcaccccacccgtgcccctctytgsctcagcttcccctcttcccctgcagtgagtttcctgcgcagcggcactaagctcatcttccgccggaggcctaggcagaaggaagctggcctgagccaatcacacgatgacctctccaacgcaacggccacgcccagtgtccgaaagaaggccggcagcttttctcgccgccttatcaagcgcttttccttcaaatccaaacccaaggccaatggtaaccccagcccccagctctgaggacccagctctgaaagggcacgagttctctcagcccattccccacctccccttccataccccttcctggatctccagtgcctgggccaggaaagccctctgggttccgggaagccccgtccaccctgggccatggggccggttggaaggatacttggaacgggaagcacatgagaggtgggcacccggtgccgaggacatggacgagggactggtggctgggagggagaggagggccctgtccggcatgtgtgggtattccccagaagcatttgcctcctgctgagcctggtccctgagcggagtcccagggtgctcagctcttcarctgacccttcttcccttatttattctcttttctatttatatgtgtggcttaggaccctccgtgaacagatgatagagggcatctctcccaggtgacccttcttttctgtcccaggagggtgggtaattccctttgggatggggctcccacacctccctcaggtccccactcagaccagcaccagtgtctgcctctgagaatgttggcagctcacagagagcagggccggcccgggatggggggcaggtactccccaccttcctgcctcccctcctgctcctcatccctccctccccctttattaccgttttttgtacttgatgccttctctgtgagcagtggctctgtgggaaggagggagccgggagcctggtgggaagccttccccagagagatggctttaggggctttatttaaagactgtgatgatggagccacgcaaggctgcacctctgtgtgttgggagacgatgatgatgtccattgctgtgtgatggcttggaatttaatttattaaagtcaaattggagtttaaaaaaaaaaaaaaaaaaaaaattcggggggggcccctnacccattggccctaaggggggg

SEQ ID NO: 234 - DNA, 2208 bp, Homo sapiens
  misc_feature (1314): n equals a,t,g, or c
  misc_feature (2189): n equals a,t,g, or c
  misc_feature (2202): n equals a,t,g, or c
acagggctcggagccaagctcagagaacgccaatgacaccatcattttgcgcaacctgaacccacacagcaccatggattccatcctgggggccctggcaccctacgcggtgctgtcctcctccaacgtgcgcgtcataaaggacaagcagacccaactgaaccgcggctttgccttcatccagctctccaccatcgaggcagcccagctgctgcagatcctgcaggccctgcacccaccactcactatcgacggcaagaccatcaatgttgagtttgccaagggttctaagagggacatggcctccaatgaaggcagtcgcatcagtgctgcctctgtggccagcactgccattgctgcggcccagtgggccatctcacaggcctcccaaggtggggagggtacctgggccacctccgaggagccgccggtcgactacagctactaccaacaggatgagggctatggcaacagccagggcacagagtcttccctctatgcccatggctacctcaagggcaccaagggccctggcatcactggaaccaaaggggatcccactggagcaggtcccgaggcctccctagagcctggggccgactctgtgtcgatgcaggctttctctcgcgcccagcctggtgctgctcctggcatctaccaacaatcagccgaggcgagcagtagccagggcactgctgccaacagccagtcgtataccatcatgtcacccgctgtgctcaaatctgagctccagagccctacccatcctagttctgctctcccaccggctaccagccccactgcccaggaatcctacagccagtaccctgttcccgacgtctctacctaccagtacgatgagacctccggctactactatgacccccagaccggcctctactatgaccccaactcccagtattactacaatgctcagagccagcagtacctgtactgggatggggagaggcggacctatgttcccgccctggagcagtcggccgacggacataaggagacaggggcaccctcgaaggagggcaaagagaagaaggagaagcacaagaccaagacagctcaacagattgccaaggacatggaacgctgggcccgcagtctcaacaaacaaaaagaaaacttcaaaaatagcttccagcctatcagctccctgcgagatgacgagaggcgggagtcagccactgcagatgctggctatgccatcctcgagaagaagggagcactagccgagagacagcacaccagcatggatctcccgaaattggccagtgacgaccgcccaagccctccgcgagnactggtggcagcctacagcggggagagtgacagtgaggaggagcaggagcgtgggggccctgagcgggaggagaagctcaccgactggcagaagctggcctgtctgctctgccgacgccagttccccagcaaagaggcgctcatccggcaccagcagctctcagggctccacaagcaaaaccttgagattcaccggcgagcccacttgtcagaaaacgagctagaagcactagagaagaatgacatggagcaaatgaagtaccgggaccgtgcagctgaacgcagagaaaagtatggcatccccgagccgccagagcccaagaggaggaagtacggcggcatatccacagcctctgtagacttcgagcagcctactcgggacgggctgggcagtgacaacattggcagtcggatgctgcaggccatgggctggaaagagggcagcggcctgggccgmaagaagcagggcattgtaacgcctatcgaggcccaaacacgggtgcggggctccggcctgggtgcacggggcagctcctacggggtcacctcaaccgagtcctacaaggagacactgcacaagacaatggtgacccgcttcaacgaggcccagtgagcagcttcaagagcaacttctccacatgttgggtgtccatcctggggcagggaaggacagagtgttggatggctgggacggggccttgctcttgtcggccagcccactccccagccagagagggcttgaccaaatcaaattgaggtggtgacttttgttggaaaattgggctgggatcacgtcctgttttgtaataaaagctgaaaagtctgaaaaaaaaaaaaaaaaaaaacccggggggggggcccggtacccattttcnccctaaagtgagnggtttt

SEQ ID NO: 235 - DNA, 2580 bp, Homo sapiens
  misc_feature (1): n equals a,t,g, or c
  misc_feature (3): n equals a,t,g, or c
  misc_feature (2558): n equals a,t,g, or c
ntncacgcgtccggggcgccagacccggctttgccgtccggctattagcctactgtggctagtcacccccggggtcccggccttctcgggctggggccgccgccaccgcggcaggacggggaggcgggccatggcgtcctgcgtggggagccggaccctaagcaaggatgatgtgaactacaaaatgcatttccggatgatcaacgagcagcaagtggaggacatcaccattgacttcttctaccggccgcataccatcaccctgctcagcttcaccatcgtcagcctcatgtacttcgcctttaccagggatgactctgttccagaagacaacatctggagaggcatcctctctgttattttcttctttcttatcatcagtgtgttagctttccccaatggtccgttcactcgacctcatccagccttatggcgaatggtttttggactcagtgtgctctacttcctgttcctggtattcctactcttcctgaatttcgagcaggttaaatctctaatgtattggctagatccaaatcttcgatacgccacaagggaagcagatgtcatggagtatgctgtgaactgccatgtgatcacctgggagaggattatcagccactttgatatttttgcatttggacatttctggggctgggccatgaaggccttgctgatccgtagttacggtctctgctggacaatcagtattacctgggagctgactgagctcttcttcawgcatctcctccccaattttgccgagtgctggtgggatcaagtcattctggacatcctgttgtgcaatggcggtggcatttggctgggcatggtcgtttgccggtttttagagatgaggacttaccactgggcaagcttcaaggacattcataccaccaccgggaagatcaagagagctgttctgcagttcactcctgctagctggacctatgttcgatggtttgaccccaaatcttcttttcagagagtagctggagtgtaccttttcatgatcatctggcagctgactgagttgaataccttcttcttgaagcatatctttgtgttccaagccagtcatccattaagttggggtagaattctctttattggtggcatcacagctcccacagtgagacagtactacgcttacctcaccgacacacagtgcaagcgcgtaggaacacaatgctgggtgtttggggtcattggtttcctggaggccattgtttgcataaaatttggacaagatctcttctctaagacccaaatactctatgttgtgctttggcttctttgcgtggctttcaccactttcctctgtctgtacggcatgatttggtatgcagaacactatggtcaccgagaaaagacctactcggagtgtgaagatggcacctacagtccagagatctcctggcatcacaggaaagggacaaaaggttctgaagacagcccacccaagcatgcaggcaacaacgaaagccattcttccaggagaaggaatcggcattccaagtcaaaagtcaccaatggcgttggaaagaaatgaaaaaccctggttaatcaaagatgttccagagtgcctagaactgagagggaaatggaactcatttggaactccccgtgaggaggtcgaggcgcacagggcaagcaggaagaggcgagggcacttgggggtcattatttgagatcgtaagtcttgtttcccacagacctggccgcgtcaggcagatcatcgcctggggggcctttgccaacgtggggtctcttctaacttcagcacttgacatgcggtcaccggtggcagcgcggtgtgttgaagggaaacggtagctattcattcacagttgccaagagcagctccgcgcctgctggatcgtggatgcagcgtaaacatcttccttcagacgaggcattaaccccatggttaatggactggtcaccagtttttattttatttttatgaatctacctttccattgattgatttaagttcaggccacttttctgtcttttatttggttactgttgttatttgtttttaagttaggatgctttttaacagcctttagaagccgctgctgaaattgatactgggggaagggttccccttccttctagagcagaaaagggagagaggtgttgtattcctgtttggtaacctcagtctcctgtaagacctcctaccacatggcgagtatacaccaatcaggagagggtagctgcctgcataggagcctcgcttccgattattcccttcccaatattattcatccagacttagccacagtgcacaaaagcaaacctgctagagaggcagtgaacaccacagcttctccccagctaggtgccttttacatcgggtttgttctccttccatggtgtgttgctgacattgtcactgagtcccatgtgaggtgctggtgagtattacctttcatctgtgccatgctctagaaccttgaccttgatagttcaccacctctgatggatccctgttttaaataaaaacgattcactttaaagcctaaaaaaaaaaaaaaattggggggggncccgtaacccaattggcccttt

SEQ ID NO: 236 - DNA, 3008 bp, Homo sapiens
  misc_feature (3001): n equals a,t,g, or c
  misc_feature (3008): n equals a,t,g, or c
gtcatcactctgttgcccaggctggaatggtgaagtgcagtggcatgatctcggctcagtgcagcctctgtctcccgggttcaagcgattctcctgcctcagcctctaaagagtgtgaggaagaggctgtctgtgtcattatgtgtgcgtcggtcaagtataatatccggggtcctgccctcatcccaagaatgaagaccaagcaccgaatctactatatcaccctcttctccattgtcctcctgggcctcattgccactggcatgtttcagttttggccccattctatcgagtcctcaaatgactggaatgtagagaagcgcacatccgtgatgtgccggttgttaggctgccagccgacagtcccatcccagagcggggggatctcagttgcagaatgcacacgtgttttgatgtctatcgctgtggcttcaacccaaagaacaaaatcaaggtgtatatctatgctctgaaaaagtacgtggatgactttggcgtctctgtcagcaacaccatctcccgggagtataatgaactgctcatggccatctcagacagtgactactacactgatgacatcaaccgggcctgtctgtttgttccctccatcgatgtgcttaaccagaacacactgcgcatcaaggagacagcacaagcgatggcccagctctctaggtgggatcgaggtacgaatcacctgttgttcaacatgttgcctggaggtcccccagattataacacagccctggatgtccccagagacagggccctgttggctggtggcggcttttctacgtggacttaccggcaaggctacgatgtcagcattcctgtctatagtccactgtcagctgaggtggatcttccagagaaaggaccaggtccacggcaatacttcctcctgtcatctcaggtgggtctccatcctgagtacagagaggacctagaagccctccaggtcaaacatggagagtcagtgttagtactcgataaatgcaccaacctctcagagggtgtcctttctgtccgtaagcgctgccacaagcaccaggtcttcgattacccacaggtgctacaggaggctactttctgtgtggttcttcgtggagctcggctgggccaggcagtattgagcgatgtgttacaagctggctgtgtcccggttgtcattgcagactcctatattttgcctttctctgaagttcttgactggaagagagcatctgtggttgtaccagaagaaaagatgtcagatgtgtacagtattttgcagagcatcccccaaagacagattgaagaaatgcagagacaggcccggtggttctgggaagcgtacttccagtcaattaaagccattgccctggccaccctgcagattatcaatgaccggatctatccatatgctgccatctcctatgaagaatggaatgaccctcctgctgtgaagtggggcagcgtgagcaatccactcttcctcccgctgatcccaccacagtctcaagggttcaccgccatagtcctcacctacgaccgagtagagagcctcttccgggtcatcactgaagtgtccaaggtgcccagtctatccaaactacttgtcgtctggaataatcagaataaaaaccctccagaagattctctctggcccaaaatccgggttccattaaaagttgtgaggactgctgaaaacaagttaagtaaccgtttcttcccttatgatgaaatcgagacagaagctgttctggccattgatgatgatatcattatgctgacctctgacgagctgcaatttggttatgaggtctggcgggaatttcctgaccggttggtgggttacccgggtcgtctgcatctctgggaccatgagatgaataagtggaagtatgagtctgagtggacgaatgaagtgtccatggtgctcactggggcagctttttatcacaagtattttaattacctgtatacctacaaaatgcctggggatatcaagaactgggtagatgctcatatgaactgtgaagatattgccatgaacttcctggtggccaacgtcacgggaaaagcagttatcaaggtaaccccacgaaagaaattcaagtgtcctgagtgcacagccatagatgggctttcactagaccaaacacacatggtggagaggtcagagtgcatcaacaagtttgcttcagtcttcgggaccatgcctctcaaggtggtggaacaccgagctgaccctgtcctgtacaaagatgactttcctgagaagctgaagagcttccccaacattggcagcttatgaaacgtgtcattggtggaggtctgaatgtgaggctgggacagagggagagaacaaggcctcccagcactctgatgtcagagtagtaggttaagggtggaaggttgacctacttggatcttggcatgcacccacctaacccactttctcaagaacaagaacctagaatgaatatccaagcacctcgagctatgcaacctctgttcttgtatttcttatgatctctgatgggttcttctcgaaaatgccaagtggaagactttgtggcatgctccagatttaaatccagctgaggctccctttgttttcagttccatgtaacaatctggaaggaaacttcacggacaggaagactgctggagaagagaagcgtgttagcccatttgaggtctggggaatcatgtaaagggtacccagacctcacttttagttatttacatcaatgagttctttcagggaaccaaacccagaattcggtgcaaaagccaaacatcttggtgggatttgataaatgccttgggacctggagtgctgggcttgtgcacaggaagagcaccagccgctgagtcaggatcctgtcagttccatgagctattcctctttggtttggctttttgatatgattaaaattattttttattcctttwaaaaaaaaaaaaaaaaaaaaaaaaaaaaaaaaaaaaaaaaaaaaaaaaaaaaaaaaaaaanggggggn

SEQ ID NO: 237 - DNA, 877 bp, Homo sapiens
  misc_feature (834): n equals a,t,g, or c
  misc_feature (854): n equals a,t,g, or c
caattattgaagtcaagtgatgggcacagaggattgatagctcaaataaggcttggtacttgcccttggaaaaagtatgctaggattctggtgggaggggtagacatataaatggataatttataatatgatgtaagtacagagagctgtgggaacataaaggaaggaaaatgaacttgagtctgagactgctcacttctattagagccctcttctgttttgcttcatgttcagccttcaggaagaactcatttctgttgttgacaactgaagttgtctgtcagaaagcaatgttgtaaggtgacgtacagctacatatttttcctcaaaattgaggtgaaaggaatttctaaagtaggcattatgttcttaatttttatctgtgaattaagccacccagctcctcagctctttctctgttggccctctacttcagattactttctatgaagacaaaaattttcaaggccgtcgctatgactgtgattgcgactgtgcagatytccacacatacctaagtcgctgcaactccattaaagtggaaggaggcacctgggctgtttatgaaaggcccaactttgctgggtacatgtacatcttaccacagggagagtaccctgaataccagcgttggatgggcctcaacgaccgcctcagctcckgcagagctgtttcatctgcctagtggaggccagtataagattcagatctttgagaaaggggattttagtggtcagatgtatgaaaccaccgaagattgcccttccatcatggagcatttcacatgcgagagaccatcctgtaagtgctggaggtgtctggattttctatganctacccaactaccgtggcangcagtactcctggacaagaagga

SEQ ID NO: 238 - DNA, 3039 bp, Homo sapiens
  misc_feature (170): n equals a,t,g, or c
  misc_feature (177): n equals a,t,g, or c
  misc_feature (3039): n equals a,t,g, or c
ccgatgccgacctggtcatctgggaccccgacagcgttaaaaccatctctgccaagacacacaacagctctctcgagtacaacatctttgaaggcatggagtgccgcggctccccactggtggtcatcagccaggggaagattgtcctggaggacggcaccctgcatgtnaccgaangctctggacgctacattccccggaagcccttccctgattttktttacaagcgtatcaaggcaaggagcaggctggctgagctgagaggggttcctcgtggcctgtatgacggacccgtgtgtgaagtgtctgtgacgcccaagacagtcactccagcctcctcggccaagacgtctcctgccaagcagcaggccccacctgtccggaacctgcaccagtctggattcagtttgtctggtgctcagattgatgacaacattccccgccgcaccacccagcgtatcgtggcgccccccggtggccgtgccaacatcaccagcctgggctagagctcctgggctgtgccgtccactggggactggggatgggacacctgaggacattctgagacttctttcttccttcctttttttttttttgttttttttttttaagagcctgtgatagttactgtggagcagccagttcatggggtcccccttggggccccacaccccgtctctcaccaagagttactgattttgctcatccacttccctacacatctatgggtatcacacccaagactacccaccaagctcatacagggaaccacacccaacacttagacatgcgaacaagcagcccccagcgagggtctccttcgccttcaacctcctagtgtctgttagcatcttccttttcatggggggagggaagataaagtgaattgcccagagctgcctttttcttttctttttaaaaattttaagaagttttctttgtggggctggggaggggccggggtcagggagagtcttttttttttttttttttaaatactaaattggaacatttaattccatattaatacaaggggtttgaactggacatcctaatgatgcaattacgtcatcacccagctgattccgggtggttggcaaactcatcgtgtctgtcctgagaggctccacaatgcccacccgcatcgccattctgtagtcttcagggtcagctgttgataaaggggcaggcttgcgttattggcctagattttgctgcagattaaatcctttgaggattctcttctcttttaccatttttctgcgtgctctcactctctctttctctctctagctttttaattcatgaatattttcgtgtctgtctctctctctctctgtgtttcctccagcccttgtctcggagacggtgttttcctcccttgccccattatcttttcacctcccaggtctaccatttcatggtggtcgttgggtccgcctaaaggatttgagcgtttgccattgcaagcatagtgctgtgtcatcctggtccatgtaggactggtgctaaccacctgccatcatgaggatgtgtgctagagtgtgggaccctggccaagtgcaggaatgggccatgccgtctcacccacagtatcacaygtggaaccgcagacagggcccagaagctttagaggtatgaggctgcagaaccggagagattttcctctgtgcagtgctctctggctaaagtcacggtcaaacctaaacaccgagcctcattaacccaagtgaaccaaccaaagtcaccagttcagaagtgctaagctaataggagtctgacccgagggcctgctgcttcctggttaagtatcttttgagattctagaacacatgggagctttttattttcggggaaaaaccgtatttttttcttgtccaattatttctaaagacacactacatagaaagaggccctataaactcaaaaagtcattgggaaacttaaagtctattctactttgcaagaggagaaatgtgttttatgaacgatagatcacatcagaactcctgtggggaggaaaccttataaattaaacacatggcccccttagagaccacaggcgatgtctgtctccatccttccctctccttttctgtcacctttccccctagctggctcctttggacctacccctgtccttgctgacttgtgttgcattgtattccaaacgtgtttacaggttctcttaagcaatgttgtatttgcaggcttttctgaataccaaatctgctttttgtaaagcgtaaaaacatcacaaagtaggtcattccatcaccacccttgtctctctacacattttgcctttggggatctggttggggttttgggttttttgttgttgttgtttatttgttattttaaaggtaaattgcacttttaaaaaaataattggttgacttaatatatttgctttttttctcacctgcacttagaggaaatttgaacaagttggaaaaaaacaatttttgtttcaattctaagaaacacttgcagctctagtattcacttgagtcttcctgtttttcctgtaccgggtcatggtaatttttggttgttttggttgttttcttaaaaaacaagttaaaacctgacgatttctgcaggctgtgtaagcatgtttacctgttggcttgctttgtgtgtctgttaaatgaatgtcatatgtaaatgctaaaataaatcgacagtgtctcagaactgaataactgcagtgacttgatgctctaaaacagtgtaggayttaagaatagatggtttttaatcctggaaattgtgattgtgacccatgagtggaggaactttcagttctaaagctgataaagtgtgtagccagaagagtacttttttttttgtaaccactgtcttgatggcaaaataattatggtaaaaaacaagtctcgtgtttattattccttaagaactctgtgttatattaccatggaacgcctaataaagcaaaatgtggttgtttcaaaaaaaaaaaaaaaaaaaaaaaaaaaaaaaaaaaaaaaaaaaaaaaccccgggggggggcccn

SEQ ID NO: 239 - DNA, 1992 bp, Homo sapiens
  misc_feature (1): n equals a,t,g, or c
  misc_feature (12): n equals a,t,g, or c
  misc_feature (13): n equals a,t,g, or c
  misc_feature (29): n equals a,t,g, or c
  misc_feature (87): n equals a,t,g, or c
  misc_feature (1989): n equals a,t,g, or c
nacactcctgannctccctaaatttaatnaagctggccctccaccgcggtggcggccgctctagaactagtggatcccccgggctgnaggaattcggcacgagcgcggtgctgctgcgcctgggcgatgagctggagatgatccggcccagcgtctaccgcaacgtggcgcgtcagctgcacatctccctgcagtctgagcctgtggtgaccgatgcgttcctggccgtggctggccacatcttctctgcaggcatcacgtggggcaaggtggtgtccctgtatgcggtggccgcggggctggccgtggactgtgtgaggcaggcccagcctgccatggtccacgccctcgtggactgcctgggggagttcgtgcgcaagaccctggcaacctggctgcggagacgcggcggatggactgatgtcctcaagtgtgtggtcagcacagaccctggcctccgctcccactggctggtggctgcactctgcagcttcggccgcttcctgaaggctgccttcttcgtgctgctgccagagagatgagctgcccacctggcagtggccgcagcctggccctctggccaacgcaggaggccctcagcacccgaacacatcttcctcctccccacccgagcctggagcactctaaccctcggagaccccctaagccccgttcctccgcagacccaggccctccggaaggggtgagtggggaggggctttcctgagcctggagctgggctttggggcagcctgcgaccctccccgcttgtgtcccttctcctgtgatctctgtgttttcccttttctttctggggccaggaagtcagggtcaactcccaggcctcagatgcaggggcccagaacacctgctctcacctgagccccaggtgaaggggcccgggaacacctgctctcacctgagccccaggtgaaggggcccgggaacacctgctctcacctgagccccaggtgaaggggcccggaacacctgctctcacctgagccccaggtgaaggggcccgggaacacctgctctcacctgagccccaggtgaaggggcccggaacacctgctctcacctgagccccaggtgaaggggcccggaacacctgctctcacctgagccccaggtgaaggggcccgggaacacctctcacctgaacccgggggtcccatcccaggaagaagggccatctcaggacatgagtcctcaggggccctgcacattcaatctgaaggtgaccctggcctggctgaagctggaagagctgtggggactcagcctgtaaacagagcgtaaggttcacatgctggttgcttaatccgtttctggaggaagagtatgacacccacttgtgatggggtccttgtgcggtggggaccggggccggcgggctccaggccagcacacctaacccatggatgtggaacctacggccgagaaggaatgttgcatgagtcggatcccagtccattgtcagtggagggtgagggtgaccccatctgctatttttgtgctcatcctcatacaaccatttggggatgtgcctattagggctccgtaagaactcagatgcctgggaagcccagcccctcaggtgcccccacacacagccttcccttgacgcctacatttctaggcacatgtgaggcatctttcctggagccccgagccagccctgtccctccccagtgcagcatggcactcaggagatacaggctggacatggggcagtcgttctggggaggcctggcctagcagccacccacctgagccctcccggccaggcttcgtgctggggtgggccatgtgccaggacaggagggtcccggcggaaagccagccccggactcatcgtgacattgagatcccactggagggtaggggtggtaataaacttctccaaacgatgcgttgtcattttaaaaaaaaaaaaaaaaaaaaaaaaaaaaaaaaaaaaaaaaaaaaaaaaaaaaaaaaaaaaanccc

SEQ ID NO: 240 - DNA, 497 bp, Homo sapiens
  misc_feature (387): n equals a,t,g, or c
  misc_feature (476): n equals a,t,g, or c
ggcagaactgtctgggacagacgctgcccggatccctgcggctgcctgcactctggaccacgagctctgagagcagcaggttgagggccggtgggcagcagctcggaggctccgcgaggtgcaggagacgcaggcatggccggtgagctgactcctgaggaggaggcccagtacaaaaaggctttctccgcggttgacacggatggaaacggcaccatcaatgcccaggagctgggcgcggcgctgaaggccacgggcaagaacctctcggaggcccagctaaggaaactcatctccgaggttgacrgcgacggcgacggcgaaatcagcttccaggagttcctgacggcggcrargaaggccagggccggcctggaggacctgcangtcgccttccgcgccttcgaccaggatggcgacggccacatcaccgtggacgagctcaggcgggccatkgcggggytggggmaccttcnagagattgaccattttggagc

SEQ ID NO: 241 - DNA, 316 bp, Homo sapiens
  misc_feature (133): n equals a,t,g, or c
  misc_feature (311): n equals a,t,g, or c
atcgggcagcccacacaagcggcaaaccagaatggcactggaaatggagccgcagaggtacgcgatgaggatcattccaggcgcgattgcactcataagctgttccgttttgaaaattcgtgttcaacgatgnaatctgtggataatacgcacatttcgccggaagtggtatccggttagccaraaagcaggcaggacgtgatggatattgtatttatagagcaactttcggtaatcaccactattggtgtttacgactgggrrcaacyatcgaacagaagttagtgttcgatatcgaaatggcgtggggntaacc

SEQ ID NO: 242 - DNA, 829 bp, Homo sapiens
  misc_feature (1): n equals a,t,g, or c
  misc_feature (3): n equals a,t,g, or c
  misc_feature (4): n equals a,t,g, or c
  misc_feature (14): n equals a,t,g, or c
  misc_feature (47): n equals a,t,g, or c
  misc_feature (793): n equals a,t,g, or c
  misc_feature (809): n equals a,t,g, or c
  misc_feature (814): n equals a,t,g, or c
ngnntttcttcggngggggggaataaggggacacagctcacactatnttaaggtacgcctgcaggtaccggtccggaattcccgggtcgacccacgcgtccggaaagaaaagaagaaaagaaaaaaagatccttcaaagggcagatgggtagaaggcataacctctgagggttaccattactattatgatcttatctcaggagcatctcagtgggagaaacctgaaggatttcaaggagacttaaaaaaggtaattgaagcatattaatagtgtttttgttttattctttacagtgattcgtttcttaggtttttgtagagttttgctaagcaactttatttacaaatactccactccctccacccccaaactgtgtccttttttttcccataatgcttttgttagaaggctggatggagatgaaatagtgatatctggctgggtgcagtggctcatgcctgtaatcccagcactttgggaggctgaggcatgtggatcacaaggtcaggagttaaagaccagcctggccaagatggtgaaaccctatctctcctaaaaactacaaaaaaattagccaggcgcagtcgcagttgcctgtaatcccagctactcaggaggctgagtcaggggaatcactgggacctggggcggcagaggttaacagtgagccgagattgcaccaccgcactccagcctggataacaaagtaagactccgtctcaaaaaaaaaaaaaaaaaaagggcggccgctctagaggatccctcgaggggcccaagcttacgcgtgcatknaacgtcataggggctngggcntttacctttcccgtc

SEQ ID NO: 243 - DNA, 838 bp, Homo sapiens
  misc_feature (32): n equals a,t,g, or c
  misc_feature (51): n equals a,t,g, or c
  misc_feature (822): n equals a,t,g, or c
  misc_feature (832): n equals a,t,g, or c
taaacccgaagtgccaaataataatttaaaanatgttaatttttttggccncctaaatttgccctttccatccattaaaaatgtccaagttccaagtgatatgtgcccctaatatccaccttggatgttggtgggtttttgaatttttgggtggttaatccagttttattttgaaaagacgtacttgaatagttacagcatatgtttgaacaggaagtaggaacatgcatacacgaagaaatgctaacggaaggatttgttatgtttaggatcttcccttggaaactaaaaatagaatattaatgacattactgtttgtagaatgacatatgcagattttctcataagcagtcattgtgtttgccagtaatgtttgagagacatgtaagttgaaagttttgctaaattataaagctcctttaattcgttggttttgattctcttattctcttgtcttttctaaatgttaacaaaatatatcttaacagattacatgaaatttaggaattatttaaaagttaccattagctctaaaattaagattcggatgctttatttatagtaactgaagctaataatgttttatgttttgattttttgaaatttaattgtagaagtcactgccttctgagttttcaaatagataaccacctttaatattacactgcttataatactaatgtttacagatatgtttctgtttataaccatataatacattggctttgtcatattagttttttttgcaagtagttatgtaaaagagatagataataaaatattaaataacaaaaaaaaaaraaaargctcgagtaarggcanagtggcatgngccata

SEQ ID NO: 244 - DNA, 2853 bp, Homo sapiens
  misc_feature (2665): n equals a,t,g, or c
ggcacagcaacagctctgggaccatctcaggccccgctgccctcccctaggccacaggcagccccgtgtccatcttcgtctatgatgtgaagcctggcgcggaagagcagacccaggtggccaaagctgccttcaagcgcttcaaaactctacggcaccccaacatcctggcttacatcgatggactggagacagaaaaatgcctccacgtcgtgacagaggctgtgaccccgttgggaatatacctcaaggcgagagtggaggctggtggcctgaaggagctggagatctcctgggggctacaccagatcgtgaaagccctcagcttcctggtcaacgactgcagcctcatccacaacaatgtctgcatggccgccgtgttcgtggaccgagctggcgagtggaagcttgggggcctggactacatgtattcggcccagggcaacggtgggggamctccccgcaagggatccccgagcttgagcagtatgaccccccggagttggctgacagcagtggcagagtggtcagagagaagtggtcagcagacatgtggcgcttgggctgcctcatttgggaagtcttcaatgggcccctacctcgggcagcagccctacgcaaccctgggaagatccccaaaacgctggtgccccattamtgtaagctggtgggagcaaaccccaaggtgcgtcccaacccagcccgcttcctgcagaactgccgggcacctggtggcttcatgagcaaccgctttgtagaaaccaacctcttcctggaggagattcagatcaaagagccagccgagaagcaaaaattcttccaggagctgagcaagagcctggacgcattccctgaggatttctgtcggcacaaggtgctgccccagctgctgaccgccttcgagttcggcaatgctggggccgttgtcctcacgcccctcttcaaggtgggcaagttcctgagcgctgaggagtatcagcagaagatcatccctgtggtggtcaagatgttctcatccactgaccgggccatgcgcatccgcctcctgcagcagatggagcagttcatccagtaccttgacgagccaacagtcaacacccagatcttcccccacgtcgtacatggcttcctggacaccaaccctgccatccgggagcagacggtcaagtccatgctgctcctggccccaaagctgaacgaggccaacctcaatgtggagctgatgaagcactttgcacggctacaggccaaggatgaacagggccccatccgctgcaacaccacagtctgcctgggcaaaatcggctcctacctcagtgctagcaccagacacagggtccttacctctgccttcagccgagccactagggacccgtttgcaccgtcccgggttgcgggtgtcctgggctttgctgccacccacaacctctactcaatgaacgactgtgcccagaagatcctgcctgtgctctgcggtctcactgtagatcctgagaaatccgtgcgagaccaggccttcaaggcattcggagcttcctgtccaaattggagtctgtgtcggaggacccgacccagctggaggaagtggagaaggatgtccatgcagcctccagccctggcatgggaggagccgcagctagctgggcaggctgggccgtgaccggggtctcctcactcacctccaagctgatccgttcgcacccaaccactgccccaacagaaaccaacattccccaaagacccacgcctgaaggagttcctgccccagcccccacccctgttcctgccacccctacaacctcaggccactgggagacgcaggaggaggacaaggacacagcagaggacagcagcactgctgacagatgggacgacgaagactggggcagcctggagcaggaggccgagtctgtgctggcccagcaggacgactggagcaccgggggccaagtgagccgtgctagtcaggtcagcaactccgaccacaaatcctccaaatccccagagtccgactggagcagctgggaagctgagggctcctgggaacagggctggcaggagccaagctcccaggagccacctcctgacggtacacggctggccagcgagtataactggggtggcccagagtccagcgacaagggcgaccccttcgctaccctgtctgcacgtcccagcacccagccgaggccagactcttggggtgaggacaactgggagggcctcgagactgacagtcgacaggtcaaggctgagctggcccggaagaagcgcgaggagcggcggcgggagatggaggccaaacgcgccgagaggaaggtggccaagggccccatgaagctgggagcccggaagctggactgaaccgtggcggtggcccttcccggctgcggagagcccgccccacagatgtatttattgtacaaaccatgtgagcccggccgcccagccaggccatctcacgtgtacataatcagagccacaataaattctatttcacaccccttgtgccgggctcagtctagcccctgggaggcggctggggtctggcgccgccctcgcagcccgcgcccacgtcagacgtgaacatcaatttgcttcgaaagccaagggtaaagaggcacgatytgatttatcagtttctaggaaacacctctgggagganagcaggcagcgcccrccggagaccttacaaccgcccgctaaccggggaggggggccggtaggggcgcctcgggtytcaaggcgccgggagggtctwgcggccctgaaggtccctkggtccgagccacaagtcggggcagaagtgaggccgagctcgcggaaatccctcaagtgatcaccgaggtctgg

SEQ ID NO: 245 - DNA, 1197 bp, Homo sapiens
  misc_feature (218): n equals a,t,g, or c
  misc_feature (1193): n equals a,t,g, or c
gctcgtgccgcggcctgcttctacctggctgagatcacgctggccctgggccatctccactcccagggcatcatctaccgggacctcaagcccgagaacatcatgctcagcagccagggccacatcaaactgaccgactttrgactctgcaaggagtctatccatgagggcgccgtcactcacaccttctgcggcaccattgagtacatggcccctgnagattctggtgcgcagtggccacaaccgggctgtggactggtggagcctgggggccctgatgtacgacatgctcactggatcgccgccctttaccgcagagaaccggaagaaaaccatggataagatcatcaggggcaagctggcactgcccccctacctcaccccagatgcccgggaccttgtcaaaaagtttctgaaacggaatcccagccagcggattgggggtggcccaggggatgctgctgatgtgcagagacatccctttttccggcacatgaattgggacgaccttctggcctggcgtgtggacccccctttcaggccctgtctgcagtcagaggaggacgtgagccagtttgatacccgcttcacacggcagacgccggtggacagtcctgatgacacagccctcagcgagagtgccaaccaggccttcctgggcttcacatacgtggcgccgtctgtcctggacagcatcaaggagggcttctccttccagcccaagctgcgctcacccaggcgcctcaacagtagcccccgggcccccgtcagccccctcaagttctccccttttgaggggtttcggcccagccccagcctgccggagcccacggagctacctctacctccactcctgccaccgccgccgccctcgaccaccgcccctctccccatccgtcccccctcagggaccaagaagtccaagaggggccgtgggcgtccagggcgctaggaagccgggtgggggtgagggtagcccttgagccctgtccctgcggctgtgagagcagcaggaccctgggccagttccagagacctgggggtgtgtctgggggtggggtgtgagtgcgtatgaaagtgtgtgtctgctggggcagctgtgcccctgaatcatgggcacggaggccgcccgccrmgccccgcgctcaactgctcccgtggaagattaaagggctgaatcatgaaaaaaaaanaaaa

SEQ ID NO: 246 - DNA, 848 bp, Homo sapiens
ggcacgaggagagagacctggcggccgggcagcatggcggggctggagctcttgtcggaccagggctaccgggtggacgggcggcgcgccggggagctgcgcaagatccaggcgcggatgggcgtgttcgcgcaggctgacggctcggcctacattgagcagggcaacaccaaggcactggctgtggtctacggcccgcacgagatccggggctcccgggctcgagccctgccggacagggccctagtgaactgtcaatatagttcagcgaccttcagcacaggtgagcgcaagcracggccacatggggaccgtaagtcctgtgagatgggcctgcagctccgccagactttcgaagcagccatcctcacacagctgcacccacgctcccagattgatatctatgtgcaggtgctacaggcagatggtgggacctatgcagcttgtgtgaatgcagccacgctggcagtgctggatgccgggatacccatgagagactttgtgtgtgcgtgctcagctggcttcgtggacggcacagccctggcggacctcagccatgtggaggaagcagctggtggcccccagctggccctggccctgctgccagcctcaggacagattgcgctgcttgagatggatgcccggctgcacgaggaccacctggagcgggtgttggaggctgctgcccaggctgcccgagatgtgcacaccctcttagatcgagtggtccggcagcatgtgcgtgaggcctctatcttgctgggggactgaccacccagccacccatgtccagaataaaaccctcctctgcccamaaaaaaaaaaaaaaaaaaaaaaaaaaaaaaaaa

SEQ ID NO: 247 - DNA, 1336 bp, Homo sapiens
  misc_feature (26): n equals a,t,g, or c
  misc_feature (1336): n equals a,t,g, or c
ccccgcggggacaaggcccggacggngccgccggccgccagcgcccgcccgtctcgcagcaagagaggtggagaagagcgagtacttgagaaagaagaggaagaagatgatgatgaagatgaagatgaagaagatgatgtgtcagagggctctgaagtgcccgagagtgaccgtcctgcaggtgcccagcaccaccagcttaacggcgagcggggacctcagagtgccaaggagagggtcaaggagtggaccccctgcggaccgcaccagggccaggatgaagggcgggggccagccccgggcagcggcacccgccaggtgttctccatggcagccatgaacaaggaagggggaacagcttctkttgccaccgggccagactccccgtcccccgtgcctttgcccccaggcaaaccagccctacctggggccgacgggaccccctttggctgtcctcccgggcgcaaagagaagccatctgatcccgtcgagtggaccgtgatggatgtcgtcgaatattttactgaggctggattcccggagcaggcgacagttttccaagagcaggaaattgatggcaaatctttgctgctcatgcagcgcacagatgtgctcaccggcctgtccatccgcctcgggccagccctgaaaatctacgagcaccacatcaaggtgcttcagcaaggccactttgaggatgatgaccccgatggcttcttaggctgagcgcccagcctcacccctgccccagcccattccggcccccatctcacccaagatcccccagagtccaggagctggacggggacaccctcagccctcataacagattccaaggagagggcaccctcttgtccttatctttgccccttgtgtctgtctcacacacatctgctcctcagcacgtcggtgtggggaggggattgctccttaaaccccaggtggctgaccctccccacccagtccaggacattttaggaaaaaaaaaatgaaatgtggggggcttctcatctccccaagatcctcttccgttcagccagatgtttcctgtataaatgtttggatctgcctgtttattttggtgggtggtctttcctccctcccctaccacccatgccccccttctcagtctgcccctggcctccagcccctaggggactagctgggttggggttcctcgggccttttctctcctccctcttttctttctgttgattgtcgctccagctggctgtattgctttttaatattgcaccgaagkttttttaaataaaattttaaaaaaaaaaaaaaaaaaaaaaaaaaaaaaaaaaaaaaaaaaaaaaaaaaaaaaaan

SEQ ID NO: 248 - DNA, 1076 bp, Homo sapiens
gccggagagagcagttctcccgggcacctgtgtcagccctgccccttgcccctaaccacctgggtaagtcacaggcggtggtgctgtggttctgggggcagagtcccatgcctccaaggatgtcgccatcgacatgatggactctcggaccagccagcagctgcagctcattgacgagcaggattcctacatccagagtcgggcagacaccatgcagaacattgagtcgacaattgttgagttgggctccatctttcagcagttggcacacatggttaaggaacaggaggaaaccattcagaggatcgacgagaacgtgctaggagcccagctggacgttgaggccgcccattcagagatcctcaagtacttccagtctgtcacctccaaccggtggctcatggtcaaaatcttcctcatcctcattgtcttcttcatcatctttgtggtcttccttgcttgaaccctctctactctgaggcactctgttggggtttgggaccctcctgggaaggcaagtggccagtgctgccactgagcctgtgcagggtacttgggagaaaggccctgtttccctggaactgctaagaatgaccactgcccctgatcccccaccccttgcctctggccaccctgtcctccccccaccaccctcaggcctatgaaacacacagggttctagatttgaactctgctgtgaagtgactggaagggagcagaggccagctgggggccagtgggggaggttgtttccactaggagatttttataaaccctctccagcctctcccaaaggaagcgttggcagcaaagggagatgatgcccttacccaccttcctgtgagtgaagagaggaagcagccccagggaccaattttcccaattgacctctttcttcctctttcaccatgtgaggcagggagccctgagcccttcagctgcctgcacaacccctgacattggctgctggtgactcaatctgccaaatgtgctgcagctcgttttctcccaattacagcaagactgtcagcctcaaaaaaaaaaaaaaaaaaaaaaaaaaaaaaaaaaaaaaaaaa

SEQ ID NO: 249 - DNA, 2425 bp, Homo sapiens
  misc_feature (52): n equals a,t,g, or c
ccgcagcagtgcccatctcctgaccagtgccactgtgatccaagcagtgggnagtgcccatgcctccccaatgtccagggccctagctgtgaccgmtgtgcccccaacttctggaacctcaccagtggccatggttgccagccttgtgcctgccacccaagccgggccagaggccmwcctgcaacgagttcacagggcagtgccactgcsgtgccggctttggagggcggacttgttctgagtgccaagagctccactggggagaccctgggttgcagtgccatgcctgtrattgtractctcgtggaatagatacacctcagtgtcaccgcttcacaggtcactgcagctgccgcccagggtgtctggtgtgcgctgtgaccagtgtgcccgtggcttctcaggaatctttcctgcctgccatccctgccatgcatgcttcggggattgggaccgagtggtgcaggacttggcagcccgtacacagcgcctagagcagcgggcgcaggagttgcaacagacgggtgtgctgggtgcctttgagagcagcttctggcacatgcaggagaagctgggcattgtgcagggcatcgtaggtgcccgcaacacctcagccgcctccactgcacagcttgtggaggccacagaggagctgcggcgtgaaattggggaggccactgagcacctgactcagctcgaggcagacctgacagatgtgcaagatgagaacttcaatgccaaccatgcactaagtggtctggagcgagataggcttgcacttaatctcacactgcggcagctcgaccagcatcttgacttgctcaaacattcaaacttcctgggtgcctatgacagcatccggcatgcccatagccagtctgcagaggcagaacgtcgtgccaatacctcagccctggcagtacctagccctgtgagcaactcggcaagtgctcggcatcggacagaggcactgatggatgctcagaaggaggacttcaacagcaaacacatggccaaccagcgggcacttggcaagctctctgcccatacccacaccctgagcctgacagacataaatgagctggtgtgtggggcaccaggggatgcaccctgtgctacaagcccttgtgggggtgccggctgtcgagatgaggatgggcagccgcgctgtgggggcctcagctgcaatggggcagcggctacagcagacctagcactgggccgggcccggcacacacaggcagagctgcagcgggcactggcagaaggtggtagcatcctcagcagagtggctgagactcgtcggcaggcaagcgaggcacagcagcgggcccaggcagccctggacaaggctaatgcttccaggggacaggtggaacaggccaaccaggaacttcaagaacttatccagagtgtgaaggacttcctcaaccaggagggggctgatcctgatagcattgaaatggtggccacacgggtgctagagctctccatcccagcttcagctgagcagatccagcacctggcgggtgcgattgcagagcgagtccggagcctggcagatgtggatgcgatcctggcacgtactgtaggagatgtgcgtcgtgccgagcagctactgcaggatgcacggcgggcaaggagctgggctgaggatgagaaacagaaggcagagacagtacaggcagcactggaggaggcccagcgggcacagggtattgcccagggtgccatccggggggcagtggctgacacacgggacacagagcagaccctgtaccaggtacaggagaggatggcaggtgcagagcgggcactgagctctgcaggtgaaagggctcggcagttggatgctctcctggaggctctgaaattgaaacgggcaggaaatagtctggcagcctctacagcagaagaaacggcaggcagtgcccagggtcgtgcccaggaggctgagcagctgctacgcggtcctctgggtgatcagtaccagacggtgaaggccctagctgagcgcaaggcccaaggtgtgctggctgcacaggcaagggcagaacaactgcgggatgaggctcgggacctgttgcaagccgctcaggacaagctgcagcggctacaggaattggaaggcacctatgaggaaaatgagcgggcactggagagtaaggcagcccagttggacgggttggaggccaggatgcgcagcgtgcttcaagccatcaacttgcaggtgcagatctacaacacctgccagtgacccctgcccaaggcctaccccagttcctagcactgccccacatgcatgtctgcctatgcactgaagagctcttkgcccgcagggcccccaataaaccagtgtgaacccccaaaaaaaaaaaaaaaaaaaaaaaaaaaaaaaaaaaaaaaaaaaaaaaaagaaaaaaaa

SEQ ID NO: 250 - DNA, 1408 bp, Homo sapiens
  misc_feature (252): n equals a,t,g, or c
  misc_feature (1387): n equals a,t,g, or c
acggggctgtgcggagcagctgtgcagagctgcaggcgcgcgtcatggctgctttgagacagccccaggtcgcggagtgctggccgaggcccggcgagccttccgggaggagttcggggccgagcccgagctggccgtgtcagcgccgggccgcgtgcaacctcatcggggaacacacggactacaaccagggcctggtgctgcctatggctctggagctcatgacggtgctggtgggcagcccccgcaagnatgggctggtgtctctcctcaccacctctgagggtgccgatgagccccagcggctgcagtttccactgcccacagcccagcgctcgctggagcctgggactcctcggtgggccaactatgtcaagggagtgattcagtactacccagctgcccccctccctggcttcagtgcagtggtggtcagctcagtgcccctggggggtggcctgtccagctcagcatccttggaagtggccacgtacaccttcctccagcagctctgtccagactcgggcacaatagctgcccgcgcccaggtgtgtcagcaggccgagcacagcttcgcagggatgccctgtggcatcatggaccagttcatctcacttatgggacagaaaggccacgcgctgctcattgactgcaggtccttggagaccagcctggtgccactctcggaccccaagctggccgtgctcatcaccaactctaatgtccgccactccctggcctccagcgagtaccctgtgcggcggcgccaatgtgaagaagtggcccgggcgctgggcaaggaaagcctccgggaggtacaactggaagagctagaggctgccagggacctggtgagcaaagagggcttccggcgggcccggcacgtggtgggggagattcggcgcacggcccaggcagcggccgccctgagacgtggcgactacagagcctttggccgcctcatggtggagagccaccgctcactcagagacgactatgaggtgagctgcccagagctggaccagctggtggaggctgcgcttgctgtgcctggggtttatggcagccgcatgacgggcggtggcttcggtggctgcacggtgacactgctggaggcctccgctgctccccacgccatgcggcacatccaggagcactacggcgggactgccaccttctacctctctcaagcagccgatggagccaaggtgctgtgcttgtgaggcacccccaggacagcacacggtgagggtgcggggcctgcaggccagtcccacggctctgtgcccggtgccatcttccatatccgggtgctcaataaacttgtgcctccaaaaaaaaaaaaaaaaaaaaaaaaaaaaaaaaaaaaaaaaaaaaaaaaaaaaanaaaaagaaaaaaaaaaaaaaa

SEQ ID NO: 251 - DNA, 494 bp, Homo sapiens
gccggagcccacggtggtcatggctgccagagcrctctgcatgctggggctggtcctggccttgctgtcctccagctctgctgaggagtacgtgggcctgtctgcaaaccagtgtgccgtgccagccaaggacagggtggactgcggctacccccatgtcacccccaaggagtgcaacaaccggggctgctgctttgactccaggatccctggagtgccttggtgtttcaagcccctgcaggaagcagaatgcaccttctgaggcacctccagctgcccccggccgggggatgcgaggctcggagcacccttgcccggctgtgattgctgccaggcactgttcatctcagcttttctgtccctttgctcccggcaagcgcttctgctgaaagttcatatctggagcctgatgtcttaacgaataaaggtcccatgctccacccgaaaaaaaaaaaaaaaaaaaaaaaaaaaaaaaaaaaaaaaaaaaaaaaagg

SEQ ID NO: 252 - DNA, 2491 bp, Homo sapiens
  misc_feature (6): n equals a,t,g, or c
  misc_feature (16): n equals a,t,g, or c
  misc_feature (2457): n equals a,t,g, or c
ggcggnggcgcccggncctcgcccgccacgcagccgccaccgctgctgccgccctcggccacgggtcccgacgcgacagtgggcgggccagcgccgaccccgctgctgcccccctcggccacagcctcggtcaagatggagccagagaacaagtacctgcccgaactcatggccgagaaggactcgctcgacccgtccttcactcacgccatgcagctgctgacggcagaaattgagaagattcagaaaggagactcaaaaaaggatgatgaggagaattacttggatttattttctcataagaacatgaaactgaaagagcgagtgctgatacctgtcaagcagtatcccaagttcaattttgtggggaagattcttggaccacaagggaatacaatcaaaagactgcaggaagagactggtgcaaagatctctgtattgggaaagggctcaatgagagacaaagccaaggaggaagagctgcgcaaaggtggagaccccaaatatgcccacttgaatatggatctgcatgtcttcattgaagtctttggacccccatgtgaggcttatgctcttatggcccatgccatggaggaagtcaagaaatttctagtaccggatatgatggatgatatctgtcaggagcaatttctagagctgtcctacttgaatggagtacctgaaccctctcgtggacgtggggtgccagtgagaggccggggagctgcacctcctccaccacctgttcccaggggccgtggtgttggaccacctcggggggctttggtacgtggtacaccagtaaggggagccatcaccagaggtgccactgtgactcgaggcgtgccacccccacctactgtgaggggtgctccagcaccaagagcacggacagcgggcatccagaggatacctttgcctccacctcctgcaccagaaacatatgaagaatatggatatgatgatacatacgcagaacaaagttacgaaggctacgaaggctattacagccagagtcaaggggactcagaatattatgactatggacatggggaggttcaagattcttatgaagcttatggccaggacgactggaatgggaccaggccgtcgctgaaggcccctcctgctaggccagtgaagggagcatacagagagcacccatatggacgttattaaaaacaaacatgaggggaaaatatcagttatgagcaaagttgttactgatttcttgtatctcccaggattcctgttgctttacccacaacagacaagtaattgtctaagtgtttttcttcgtggtccccttcttctccccaccttattccattcttaactctgcattctggcttctgtatgtagtattttaaaatgagttaaaatagatttaggaatattgaattaattttttaagtgtgtagatgcttttttctttgttgtttaaatataaacagaagtgtaccttttataataaaaaaaagaagttgagtaaaaaaaaaaaacacacaaacctgttagtttcaaaaatgacattgcttgcttaaaggttctgaagtaaaggcttgttaagtttctcttagttttgatttgaggcatcccgtaaagttgtagttgcagaatcccaaactaggctacatttcaaaattcagggctgtttaagatttaaaatcacaaacattaacggcagtaggcaccaccatgtaaaagtgagctcagacgtctctaaaaaatgtttcctttataaaagcacatggcggttgaatcttaaggttaaattttaatatgaaagatcctcatgaattaaatagttgatgcaatttttaacgttaattgatataaaaaaaaaaacaacaaaattaggcttgtaaaactgactttttcattacgtgggttttgaaatctagccccagacatactgtgttgagagatacttagagggagggagtaggttttgaagaggttgatggtggtggggagggaaggcctcctgaattgagtttgatgcagagctttttagccatgaagaatctttcagtcatagtactaataattaaattttcagtatttaaaaagacaaagtattttgtccatttgagattctgcactccatgaaaagttcacttggacgctggggccaaaagctgttgattttcttaagttgacggttgtcaatatatcgaactgttcccaagttagtcaagtatgtctcaacactagcatgatataaaaagggacactgcagctgaatgaaaaaggaatcaaaatccactttgtacataagttaaagtcctaattggatttgtaccgtcctcccattttgttctcggaagattaaatgctacatgtgtaagtctgcctaaataggtagcttaaacttatgtcaaaatgtctgcagcagtttgtcaataaagtttagtccttttttaatcaaaaaaaaaaaaaaaaaaaaaaggcggncgctctagaggatccaagcttacgaccccggcat

SEQ ID NO: 253 - DNA, 1125 bp, Homo sapiens
ttcgtttaggtcggctggaaattatgtcctccgtcggttttccgcagtttttccaccaagcgagatatttttgggagttattccctaaataactgcattatatgctcctttcatgacgaaattgctgccgtggagaagactggaggaaactcgaggaagagggagaagccgacaagtgctcgacgggctaggaactgtcctgcttgggtgttagcgtttcccgycgggccagtaaggctgagtgacccggcgtgctactaggagaaggacgtacggtcctgctagtagaggaatatgtcgagtttctctagggcgccccagcaatgggccacttttgctagaatatggtatctcttagatgggaaaatgcagccacctggcaaacttgctgctatggcatctataagacttcagggattacataaacctgtgtaccatgcactgagtgactgtggggatcatgttgttataatgaacacaagacacattgcattttctggaaacaaatgggaacaaaaagtatactcttcgcatactggctacccaggtggatttagacaagtaacagctgctcagcttcacctgagggatccagtggcaattgtaaaactagctatttatggcatgctgccaaaaaaccttcacagaagaacaatgatggaaaggttgcatctttttccagatgagtatattccagaagatattcttaagaatttagtagaggagcttcctcaaccacgaaaaatacctaaacgtctagatgagtacacacaagaagaaatagacgccttcccaagattgtggactccacctgaagattatcggctataagagaataagaattgcagaaaataacagtgaagtgattgaaactttcttctgatgagtttctctaacctacaggatggagtaaaacaactgctacagttcagcacctgttttatgtgccgaatcactgtggggaaaggtcaggaaggtgtagtccttcaataggaaattgtaattaaaatataattttatagaaccatttttatgtaatctgatttgaatgttatagttgataataataaaatcacttacttggttgactatttagtgttgcatttaatgataaaaaacagaccc

SEQ ID NO: 254 - DNA, 1409 bp, Homo sapiens
cactttgtcttttcttaagtaattatggtatatataaggcgttgggaaaaaacattttataatgaaagtatgtagggagtcaaatgcttactgtaaatgcataagagacgttaaaaataacactgcactttcaggaatgtttgcttatggtcctgattagaaagaaacagttgtctatgctctgcaatggtcaatgatgaattactaatgccttattttctaggcatataataatagtttagagaatgtagaccagataaatttgtttactgttttaagaaaactaccagtttacttacagaagattcttttttccaaacagtaggtttcatccaagaccatttgaagaactgcaaactctttctcttagaaaagaaagagggcagcctaaaataaacgcaaaatttgcttatactccatcacattcagatgtcttggttgtgacttattaccagtgtggcagagaacccaagttacattttagatcaaaatattctttatgtaggtattgttaaaaggctagagcctacaagttgctcttccatgcgttggtcagggggccctgaaaacactggtaatattaagagtctttctcagggtaacttaatgttttcttaatgaacartgtttccagctacaaattcttycaataaattgtcttcctttttgaaaagtactctcatagaagaaatttagcaatttctcgttgactgactcagtctattttaagtattcagaaaagattttgatccccattgagttaatgctctgccttgaaaattatttttctggatccttgttagtgataacattttttttctactgaaggtcagaggataggaaacaagtatttctcttctggtatacatgtaatgtattctgtaaaaaagtattcatattggcaattttagttaggcataatattgtggttgtaatttttaaaacttagtgttttgtctgattaaagcaggcactgatcagggtatctcctaagaggtaattcacttcttattcctttccaataattattacattctaaattttcatctatgagaaataacaaacaagaagggaatagaattaaattggggtataatctaatcttcattgtttaaatggtttgccttctcaccattgaagccattttttatagcctcagaaagaggaaataatgcctccaccattttctacctggtgacttgaaaattgaacttttaagttaggaagaagttagagtcagggaacttgtataccactatctatgcagcattgttatagtctgattatttctgtgttttgaatatgattttcctaatgctctaaataaaattttgttaaaaattaattttttatttaatgatgtgcaaatattgaatattttagtatatttattaaaagtggtagtcatt

SEQ ID NO: 255 - DNA, 490 bp, Homo sapiens
acccacgcgtccgcctctctgtcgtggcgcggcttcccgcggtcttctctgcaaatgggctccgtggcctagcgcccccgtccccgccacccgtgatcgtgcgccgaggcccgcgaggggtcgccgcccaggccgcctgggttccacttccagcaacagctcctgcagcagtaccgagtgccccggggaagccattccccaccccccaggtctccccaaggctgacccgggtcattggtgggccagcttctttttcgggaagtccaccctcccgttcatggccacggtgttggagtccgcagagcactcggaacctccccaggcctccagcagcatgamcgcctgtggcctggctcgggaagccccgaggaagcagcccggcggtcagtccagcamagccagcgctgggcccccgtcctgaactgagcggttaacaacaagccccaagcctkcggaagcgctagtycaacagagccctccgggccctttg

SEQ ID NO: 256 - DNA, 1233 bp, Homo sapiens
  misc_feature (45): n equals a,t,g, or c
  misc_feature (602): n equals a,t,g, or c
  misc_feature (931): n equals a,t,g, or c
ggcagaggttggctcggggctatgagaacgtgcccattccctgtntcacggtgtggatggggagccctgccctgaggattacaagtacatctcagagaactgcgagacgtccaccatgaacatcgatcgcaacatcacccacctgcagcactgcacgtttgtggacgactgctctagctccaactgcctgtgcggccasttcagcatccggtgctggtatgacaaggatgggcgattgctccaggaatttaacaagattgagcctccgctgattttcgagtgtaaccaggcgtgctcatgctggagaaactgcaagaaccgggtcgtacagagtggcatcaaggtgcggctacagctctaccgaacagccaagatgggctggggggtccgcgccctgcagaccatcccacaggggaccttcatctgcgagtatgtcggggagctgatctctgatgctgaggctgatgtgagagaggatgattcttacctcttcgacttagacaacaaggatggagaggtgtactgcatagatgcccgttactatggcaacatcagccgcttcatcaaccacctgtgtgaccccaacatcattcccgtccggntcttcatgctgcaccaagacctgcgatttccacgcatcgccttcttcagttcccgagacatccggactggggaggagctagggtttgactatggcgaccgcttctgggacatcaaaagcaaatatttcacctgccaatgtggctctgagaagtgcaagcactcagccgaagccattgccctggagcagagccgtctggcccgcctggacccacaccctgagctgctgcccgagctcggctccctgccccctgtcaacacatgagaacggaccacaccctctytccccagcatggatggccacagctcagccgcctcctctgccaccagntgctcgcagcccatgcctgggggtgctgccatcttctctccccaccaccctttcacacattcctgaccagagatcccagccaggccctggaggtctgacagcccctccctcccagagctggttcctccctgggagggcaacttcagggctggccaccccccgtgttccccatcctcagttgaagtttgatgaattgaagtcgggcctctatgccaactggttccttttgttctcaataaatgttgggtttggtaaaaaaaaaaaaaaaaaaaaaaaaaaaaaaaaaaaaaaaaaaaaaaaac

SEQ ID NO: 257 - DNA, 2404 bp, Homo sapiens
  misc_feature (2372): n equals a,t,g, or c
  misc_feature (2385): n equals a,t,g, or c
  misc_feature (2395): n equals a,t,g, or c
cggacggtgggacgggsaagtgggggtgaaaagcggcccgacctgcttgcggtgtagtgggcggaccgcgcggctggaggtgtgaggatccgaacccaggggtggggggtggaggcggctcctgcgatcgaaggggacttgagactcaccggccgcacgccatgagggccctgtgggtgctgggcctctgctgcgtcctgctgaccttcgggtcggtcagagctgacgatgaagttgatgtggatggtacagtagaagaggatctgggtaaaagtagagaaggatcaaggacggatgatgaagtagtacagagagaggaagaagctattcagttggatggattaaatgcatcacaaataagagaacttagagagaagtcggaaaagtttgccttccaagccgaagttaacagaatgatgaaacttatcatcaattcattgtataaaaataaagagattttcctgagagaactgatttcaaatgcttctgatgctttagataagataaggctaatatcactgactgatgaaaatgctctttctggaaatgaggaactaacagtcaaaattaagtgtgataaggagaagaacctgctgcatgtcacagacaccggtgtaggaatgaccagagaagagttggttaaaaaccttggtaccatagccaaatctgggacaagcgagtttttaaacaaaatgactgaagcacaggaagatggccagtcaacttctgaattgattggccagtttggtgtcggtttctattccgccttccttgtagcagataaggttattgtcacttcaaaacacaacaacgatacccagcacatctgggagtctgactccaatgaattttctgtaattgctgacccaagaggaaacactctaggacggggaacgacaattacccttgtcttaaaagaagaagcatctgattaccttgaattggatacaattaaaaatctcgtcaaaaaatattcacagttcataaactttcctatttatgtatggagcagcaagactgaaactgttgaggagcccatggaggaagaagaagcagccaaagaagagaaagaagaatctgatgatgaagctgcagtagaggaagaagaagaagaaaagaaaccaaagactaaaaaagttgaagaaacactctaggacggggaacgacaattacccttgtcttaaaagaagaagcatctgattaccttgaattggatacaattaaaaatctcgtcaaaaaatattcacagttcataaactttcctatttatgtatggagcagcaagactgaaactgttgaggagcccatggaggaagaagaagcagccaaagaagagaaagaagaatctgatgatgaagctgcagtagaggaagaagaagaagaaaagaaaccaaagactaaaaaagttgaaaaaactgtctgggactgggaacttatgaatgatatcaaaccaatatggcagagaccatcaaaagaagtagaagaagatgaatacaaagctttctacaaatcattttcaaaggaaagtgatgaccccatggcttatattcactttactgctgaaggggaagttaccttcaaatcaattttatttgtacccacatctgctccacgtggtctgtttgacgaatatggatctaaaaagagcgattacattaagctctatgtgcgccgtgtattcatcacagacgacttccatgatatgatgcctaaatacctcaattttgtcaagggtgtggtggactcagatgatctccccttgaatgtttcccgcgagactcttcagcaacataaactgcttaaggtgattaggaagaagcttgttcgtaaaacgctggacatgatcaagaagattgctgatgataaatacaatgatactttttggaaagaatttggtaccaacatcaagcttggtgtgattgaagaccactcgaatcgaacacgtcttgctaaacttcttaggttccagtcttctcatcatccaactgacattactagcctagaccagtatgtggaaagaatgaaggaaaaacaagacaaaatctacttcatggctgggtccagcagaaaagaggctgaatcttctccatttgttgagcgacttctgaaaaagggctatgaagttatttacctcacagaacctgtggatgaatactgtattcaggcccttcccgaatttgatgggaagaggttccagaatgttgccaaggaaggagtgaagttcgatgaaagtgagaaaactaaggagagtcgtgaagcagttgagaaagaatttgagcctctgctgaattggatgaaagataaagcccttaagggcmagrtactgtgggaaattttaccaatttgtgggaaatattagtgtccggcatttnaggggaaagtttntttttggggnaaccaaatt

SEQ ID NO: 258 - DNA, 2092 bp, Homo sapiens
  misc_feature (4): n equals a,t,g, or c
  misc_feature (27): n equals a,t,g, or c
  misc_feature (31): n equals a,t,g, or c
  misc_feature (60): n equals a,t,g, or c
  misc_feature (2069): n equals a,t,g, or c
  misc_feature (2071): n equals a,t,g, or c
tatncaacaactaaaacgactcactanaggnaaaagcaggaacgcctgcaggaaaccggnccggaattcccgggtcgacccacgcgtccgctgccgctccctttgccgccgccttagcccgggacccgaacccagcctctcccctacccgaacaccggccccggctccaccgaggcccgggtcccccagcccgtctcgccgccgccatggcggaccctaaatacgccgaccttcccggcattgccaggaatgagccagatgtttatgaaactagcgacctacctgaggatgatcaagcggagttcgatgcggaggagctgacaagcacaagtgtggaacacatcattgtcaatcctaatgctgcctatgacaagttcaaggacaagagagtggggacaaagggacttgatttctcagatcgtattggaaaaaccaagaggacaggatatgaatctggagaatatgagatgcttggagagggtctgggagtgaaggagacaccccagcaaaagtaccagcgcctactgcatgaggtccaagagctgacaactgaagttgaaaaaatcaagacgacagtgaaggagtcagccacagaggagaagctgacccctgtgttgctggctaaacagctggcagccctgaagcagcagctggttgcttcccacctggagaagctgctgggaccagatgctgcaatcaaccttaccgaccccgatggcgccctggctaagcgcctactactgcagctggaagcaacaaagaacagcaaagggggatcagggggaaaaaccactgggacccccccagatagcagccttgtcacttatgaactacattctcggcctgagcaggacaagttctctcaagctgccaaagtcgcagaacttgaaaagcgcctgacagagctggagacagctgtacgttgtgatcaggatgctcagaatcccctttctgcaggtctacagggagcctgtctcatggagactgtagagctgttgcaagcaaaggtgagcgccctagaccttgcagttttggatcaagtggaggctcggctacagagtgtcctgggaaaggtgaacgagattgccaagcataaagcctctgtagaagatgcagatacacaaagcaaggtgcaccagctatatgaaactatacagcgctggagccccattgcctccaccctccctgagctggtgcagagacttgtcaccatcaagcagctgcacgagcaagccatgcagtttggtcagctcctgacacacttggataccacccagcagatgattgctaattccttgaaggacaataccaccctcttgacccaggtgcagacaaccatgcgtgaaaacctggccacagttgaggggaactttgccagcattgatgaacggatgaagaagctgggaaagtgagcacatttgggagctggagaacaggggttatccctacccctgtgaactctgttaacagcttacatagggtttcccctttactataactctagcatccccatcccatttgacactgggggcaagggttcttcttgcatgtggggtttatacccctcccctgatgaatacagagtggtagctaggggttggttatcatcagaaggtggtctcccctcaggcctgggggataaggacgtgggcccagccacatgccaactcatgtccaatactgctttgcctggtgtggggaaggattgggtcttgtcccccaacacagcttctgtggctgactgtaatactgtacaactgtttctgaccattaaatgctgttgtactctgtgtggcctctgctgtgtttcctggggaggaagcagcactaggatatagatattcattcgtcataacaggcaatctaagccactctatactacaagagatggatttaaattgtaacctgttcttaccaaagaactaaataaaaaatgagtacagagccagagccagagtttcaaaatattctcatctgttaaattaagagtgtctcccatagaaaagcagtggaggccccacagggcaagtacaaaacagaattaaaactcaaaaaaaaaaaaaaaaaancncaagggggggcccggtcccca

SEQ ID NO: 259 - DNA, 387 bp, Homo sapiens
  misc_feature (377): n equals a,t,g, or c
aattcggcacgaggcttcattctctgacctttctctctcctcatttcggtgcatgtcctttctgcagctgcctttcagcacaggtggctgccccccagggccaccgcttctttcttgatcctctttccttaacagtgacttgggcttgagtctggcaaggaaccttgcttttagcttcaccaccaaggagagagaccaaaagcctctgatttttaatttccataaaatgttagaagtatatatatacatatatatatttctttaaatttttgagtctttgatatgtctaaaatcattcctctgcctgaagcctkagtgagcacatgargaactgtgttcattaagtgttattaatgttgaactgaaaaaaaaaaacngggggggccg

SEQ ID NO: 260 - DNA, 3712 bp, Homo sapiens
tatccccgacgaccggatcctgaggaggcagctgcggtggcagctgctgagttctcggtgaaggtatttcatttctcctgtcccctcccctccccaccccatctattaatattattcttttgaagattcttcgttgtcaagccgccaaagtggagagtgcgattgcagaagggggtgcttctcgtttcagtgcttcttcgggcggaggaggaagtaggggtgcacctcagcactatcccaagactgctggcaacagcgagttcctggggaaaaccccagggcaaaacgctcagaaatggattcctgcacgaagcactagacgagatgacaactccgcagcaaacaactccgcaaacgaaaaagaacgacatgatgcaatcttcaggaaagtaagaggcatactaaataagcttactcctgaaaagtttgacaagctatgccttgagctcctcaatgtgggtgtagagtctaaactcatccttaaaggggtcatactgctgattgtggacaaagccctagaagagccaaagtatagctcactgtatgctcagctatgtctgcgattggcagaagatgcaccaaactttgatggcccagcagcagagggtcaaccaggacagaagcaaagcaccacattcagacgcctcctaatttccaaattacaagatgaatttgaaaaccgaactagaaatgttgatgtctatgataagcgtgaaaatcccctcctccccgaggaggaggaacagagagccattgctaagatcaagatgttgggaaacatcaaattcattggagagcttggcaagcttgatcttattcacgaatctatccttcataagtgcatcaaaacacttttggaaaagaagaagagagtccaactcaaagatatgggagaggatttggagtgcctctgtcagataatgaggacagtgggacctagattagaccatgaacgagccaagtccttaatggatcagtactttgcccgaatgtgctccttgatgttaagtaaggaattgccagcaaggattcgtttcctgctgcaggataccgtagagttgcgagaacaccattgggttcctcgcaaggcttttcttgacaatggaccaaagacgatcaatcaaattcgtcaagatgcagtaaaagatctaggggtgtttattcctgctcctatggctcaagggatgagaagtgacttctttctggagggaccgttcatgccacccaggatgaaaatggatagggacccacttggaggacttgctgatatgtttggacaaatgccaggtagcggaattggtactggtccaggagttatccaggatagattttcacccaccatgggacgtcatcgttcaaatcaactcttcaatggccatgggggacacatcatgcctcccacacaatcgcagtttggagagatgggaggcaagtttatgaaaagccaggggctaagccagctctaccataaccagagtcagggactcttatcccagctgcaaggacagtcgaaggatatgccacctcggttttctaagaaaggacagcttaatgcagatgagattagcctgaggcctgctcagtcgttcctaatgaataaaaatcaagtgccaaagcttcagccccagataactatgattcctcctagtgcacaaccaccacgcactcaaacaccacctctgggacagacacctcagcttggtctcaaaactaatccaccacttatccaggaaaagcctgccaagaccagcaaaaagccaccaccgtcaaaggaagaactccttaaactaactgaaactgttgtgactgaatatctaaatagtggaaatgcaaatgaggctgtcaatggtgtaagagaaatgagggctcctaaacactttcttcctgagatgttaagcaaagtaatcatcctgtcactagatagaagcgatgaagataaagaaaaagcaagttctttgatcagtttactcaaacaggaagggatagccacaagtgacaacttcatgcaggctttcctgaatgtattggaccagtgtcccaaactggaggttgacatccctttggtgaaatcctatttagcacagtttgcagctcgtgccatcatttcagagctggtgagcatttcagaactagctcaaccactagaaagtggcacccattttcctctcttcctactttgtcttcagcagttagctaaattacaagatcgagaatggttaacagaactttttcaacaaagcaaggtcaatatgcagaaaatgctcccagaaattgatcagaataaggaccgcatgttggagattttggaaggaaagggactgagtttcttattcccactcctcaaattggagaaggaactgttgaagcaaataaagttggatccatcccctcaaaccatatataaatggattaaagataacatctctcccaaacttcatgtagataaaggatttgtgaacatcttaatgactagcttcttacagtacatttctagtgaagtaaacccccccagcgatgaaacagattcatcctctgctccttccaaagaacagttagagcaggaaaaacaactactactatctttcaagccagtaatgcagaaatttcttcatgatcacgttgatctacaagtcagtgccctgtatgctctccaggtgcactgctataacagcaacttcccaaaaggcatgttacttcgcttttttgtgcacttctatgacatggaaattattgaagaagaagctttcttggcttggaaagaagatataacccaagagtttccgggaaaaggcaaggctttgttccaggtgaatcagtggctaacctggttagaaactgctgaagaagaagaatcagaggaagaagctgactaaagaaccagccaaagccttaaattgtgcaaaacatactgttgctatgatgtaactgcatttgacctaaccactgcgaaaattcattccgctgtaatgttttcacaatatttaaagcagaagcacgtcagttaggatttccttctgcataaggtttttttgtagtgtaatgtcttaatcatagtctaccatcaaatattttaggagtatctttaatgtttagatagtatattagcagcatgcaataattacatcataagttctcaagcagaggcagtctattgcaaggaccttctttgctgccagttatcataggctgttttaagttagaaaactgaatagcaacactgaatactgtagaaatgcactttgctcagtaatacttgagttgttgcaatatttgattatccatttggttgttacagaaaaattcttaactgtaattgatggttgttgccgtaatagtatattgcctgtatttctacctctagtaatgggctttatgtgctagattttaatatccttgagcctgggcaagtgcacaagtctttttaaaagaaacatggtttacttgcacaaaactgatcagttttgagagatcgttaatgcccttgaagtggtttttgtgggtgtgaaacaaatggtgagaatttgaattggtccctcctattatagtattgaaattaagtctacttaatttatcaagtcatgttcatgccctgattttatatacttgtatctatcaataaacattgtgatacttgaaaaaaaaaaaaaaaaaaaaaaaaaaaaaaaaaaaaaaaaaaaaaaaaaaaaaaggaggaaaaaaaaaaaaaaaaaaa

SEQ ID NO: 261 - DNA, 897 bp, Homo sapiens
  misc_feature (22): n equals a,t,g, or c
agagctggaaggaggaggagangaaacctcaccttcagggcaaaccagggagacccttgtccccggccaatgtccctgctctgcctggcgagacggtgacctccccagtcaggctgcaccccgactacctctccccggaggagatacagaggcagctgcaggacatcgagaggcggctggacgccctggagctccgcggcgtggagctggagaagcgactgcgggcggccgagggagatgacgctgaggatagcctcatggtggactggttctggctcattcacgagaagcagcttctgctgagacaggagtcagagctgatgtacaagtccaaggcccagcgtctggaggagcagcagctggacatcgagggcgagctgcgccggctcatggccaagcccgaggctctgaagtcactgcaggagcggcggcgggagcaggagctgctggagcartacgtgagcaccgtgaacgaccgcartgacatcgtggactcgctkgacgaggaccggctccsggaacaagaggaggatcagatgctgcgggacatgattgagaagctgggcctccagaggaagaagtccaagttccgcttgtccaagatctggtcaccaaaaagcaaaagcagcccctcccagtagtagccagtagggccgtgggctcggcccggacctggcatccggacttggactcggggccatgggcttggcccggacccggaacccggacttgtactcggggccgtgggctcggcccggacccggcattcggacttggactcgggaagggcctcctgtccctacaaggggcatgtggacagcagggacctgcgctaccgtctgtggtctcaataaagaaaccgaccacatggaaaaaaaaaaaamaaaaaaaaaaaaa

SEQ ID NO: 262 - DNA, 1905 bp, Homo sapiens
  misc_feature (1266): n equals a,t,g, or c
  misc_feature (1791): n equals a,t,g, or c
gctgtgatagcgcgtgaggaggcagaggcctctggggtgggatcgcgggccgtaagtggctgtggagctggggtcactgcgcggtgggaccatggcctcggagaagccgctggcggcagtcacttgtacagcgccggtcaacatcgcggtcatcaagtactggggcaagcgcgatgaagagctggttctgcccatcaactcctccctgagcgtcactctgcaccaggaccagttaaaaaccaccacaacagccgtcatcagcaaggacttcaccgaggaccggatttggctgaatggccgggaggaggatgtggggcagccgmggctgcaggcctgcctgcgggagatccgctgcctggcccggaagcggaggaactcacgggatggggacccgctgccctccagcctcagctgcaaggtgcacgtggcatcggtgaacaacttccccacggctgcgggcctggcctcctcagcggcgggctatgcctgcctagcctacaccctggcccgtgtctacggcgtggagagtgacctctcagaagtggctcgccggggctcaggcagcgcctsccggagcctgtatgggggctttgtggagtggcagatgggagagcaggccgacgggaaggacagcatcgctcggcaagtggcccccgagtcacactggcctgaactccgcgtgctcatccttgtggtgagcgctgagaagaagctgacaggcagtaccgtgggcatgcgggccagtgtggagaccagccccctgcttcggttccgggccgagtccgtggtgcccgcgcgcatggcggagatggcccgctgcatccgggagcgagacttccccagcttcgcccagctgaccatgaaggacagcaaccagttccacgccacctgcctcgacaccttcccgcccatctcttacctcaatgccatctcctggcgcatcatccacctggtgcaccgcttcaacgcccaccacggggacaccaaggtggcgtacacctttgacgcgggccccaatgccgtgatcttcaccctggacgacactgtggctgagtttgtggctgctgtgtggcacggctttcccccaggctcgaatggagacacgtttctgaaggggctgcaggtgaggccggcccctctctcagctgagcttcaggctgcgctggccatggagccgacccccggtggggtcaaatacatcattgtcactcaggtggggccagggcctcaaatcctggatgacccctgcgcccacctcctgggtcntgacggcctgccgaagccagctgcctgactgcctcagcagggaccgcatgccgcttggagaaggggtggcctcgccggagctagggagcggatgtggtgggctggccggactcctgggacatgtgggtggtggcttgaccccgggcccatgggcagcttgctgtggggcagtgcagggagtcctgcggccgcccaggtgtcaggagaggtccccgccgagtgcttcagctgccctaagctgcaccagcgctttgccaagatgggatggggagggggtatgagaactggcagagcctcggtgcagcagggctgaagggctttctcaccccagctctggctatgcccagttctctgagaaaggagctcagtggggaggtggtccctccagcggaccagggaaggggtcactgtgctgggagcagcctccttgggcctcaggaaaccaccaagtgcctcggatggtggctgcccacggcgcttctgctgagaccctgcccccggcccaggtgtctcggagggtggctncccacggcctgggtgtggctggaatggtggcaggagtgggcaccagtgcggccccggtggccatggggaataaaccagcattgctgccaaaaaaaaaaaaaaaaaaaaaaaaaa

SEQ ID NO: 263 - DNA, 1424 bp, Homo sapiens
acccacgcgtccgaaatttcaattctcgtggtaataccagagtagaaggagagggtgactttaccgaactgacagccattggggaggcagatgcgggtgtggaggtgtgggctgaaggtagtgactgtttgattttaaaaagtgtgactgtcagttgtatctgttgcttttctcaatgattcagggatacaaatgggcttctctcattcattaaaagaaaacgcgacatctttctaagattctctgtgggaaaatgactgtcaataaaatgcgggtttctgggccattcgtcttactttcattttttgattacaaatttctcttgacgcacacaattatgtctgctaatcctcttcttcctagagagagaaactgtgctccttcagtgttgctgccataaaggggtttggggaatcgattgtaaaagtcccaggttctaaattaactaaatgtgtacagaaatgaacgtgtaagtaatgtttctacaggtctttgcaacaaactgtcactttcgtctccagcagagggagctgtaggaatagtgcttccagatgtggtctcccgtgtggggcccagcaatgggggcccctgatgccaagagctctggaggttcttgaaagaggggacacgaaggaggagtgactgggaagcctcccatgccaaggaggtgggaggtgccctggaaatagctgcctcatgccacttaggccatgactggatttaatgtcagtggtgtgccacagtgcagaggctagacaactgaaaggggctaccaaggctgggaaaaaaatgcaattgttgctgtgagtgactttgaaagactctggtgccttgtggtgcccttctgaaattcaaacagtaatgcaaaagtgtctgcattagaatttacggtgtctaaaattcatgtttttaaaagagcttgcctacagatggtttccacacttgaaattgtgccctgcgagttgcatagctggaagttcaatgctcagtcctaccttggctcccattaaacatttggtgctctgtggattgagttgaacgtgttgaggctttgcaatttcacttgtgttaaaggctctggcatttttccatttctatgcaaatttctttgaagcagaattgcttgcatatttcttctctgccgtcacagaaagcagagtttctttcaaacttcactgaggcatcagttgctctttggcaatgtcccttaaccatgattattaactaagtttgtggcttgagtttacaaattctacttgttgcattgatgttcccatgtagtaagtcatttttagtttggttgtgaaaaaaccctgggctgaagttggcatttcagttaaaagaaaaaaagaaactagtcccagatttgaaaacttgtaataaaattgaaactcactggaaaaaaaaaaaaaaaaaaaaaaaag

SEQ ID NO: 264 - DNA, 1287 bp, Homo sapiens
  misc_feature (111): n equals a,t,g, or c
  misc_feature (889): n equals a,t,g, or c
  misc_feature (1196): n equals a,t,g, or c
  misc_feature (1229): n equals a,t,g, or c
  misc_feature (1284): n equals a,t,g, or c
  misc_feature (1287): n equals a,t,g, or c
tccgcgccgcctccgccgcggaggaagacagcgccgcccgcgcaccgccagcgacccccgccgcagagtcccaccgccacaggcctcgggccagcggccaggagctgcctnccccagcccccgtcccgcggcccccagccgcccccaaccctgccccacgggcccggcgccatgagtgagctggagcaactgagacaggaggccgagcagctccggaaccagatccgggatgcccgaaaagcatgtggggactcaacactgacccagatcacagctgggctggacccagtggggagaatccagatgaggacccggaggaccctccgtgggcacctggcaaagatctatgccatgcactgggggaccgactcaaggctgctggtcagcgcctcccaggatgggaagctcatcatctgggacagctacaccaccaacaaggtccacgccatcccgctgcgctcctcctgggtaatgacctgtgcctacgcgccctcagggaactttgtggcctgtggggggttggacaacatctgctccatctacagcctcaagacccgcgaggcaacgtcagggtcagccgggagctgcctggccacactgggtacctgtcgtgttgccgcttcctggatgacaaccaaatcatcaccagctctggggataccacctgtgccctgtgggacattgagacaggccagcagacagtgggttttgctggacacagtggggatgtgatgtccctgtccctggcccccgatggccgcacgtttgtgtcaggcgcctgtgatgcctctatcaagctgtgggacgtgcgggattccatgtgccgacagaccttcatcggccatgaatccgacatcaatgcagtggctttcttccccaacggctacgnctttcaccaccggctytgacgacgccamgtgccgcctcttcgacctgcgggccgatcaggagctcctcatgtactcccatgacaacatcatctgtggcatcamctctgttgccttctcgcgcaggawcggctgctgctcgctggctacgamgacttcaactgcaacatctgggatgccatgaagggcgaccgtgcaggagtcctcgctggccacgacaaccgcgtgagtgcctcggggtcaccgacgatggcatggctgtggccacgggctcctgggactccttcctcaagatctggaactaatggncccaaccccactgggcccaagccaggaaggggncctgccttccccggggccaaggggccttgggtccctgcccttccaaccaagtttngtn

SEQ ID NO: 265 - DNA, 991 bp, Homo sapiens
  misc_feature (421): n equals a,t,g, or c
  misc_feature (966): n equals a,t,g, or c
gtgggcatccagctgttgaataagacctggaaggagatgcgggctacacaggaggacttcgacaaggtcatgcaggtggtgcgggagagctggcccgcactctggccctgaagcccacttccctggagctcttccgaaccaaggtgaatgcgctcacttatggggaggtgctgcggctgcggcagactgaacggctgcaccaggagggcacactggctccccctatactggagctgcgggagaagctgaagccagagctcatgggcctgatccgccagcagcgcttgctccgcctctgtgaggggacgctcttccgcaagatcagcagccggcggcgccaggataagctgtggttctgctgcctgtcccccaaccacaagctgctgcagtacggagacatggaggagggcgccagcgcctnaccctggagagtctgcccgagcaactccctgtggccgacatgagggcactcctgacaggcaaggactgcccccatgtccgggagaagggctccgggaagcagaacaaggacctctatgagttggccttctcaatcagctatgaccgtggggaggaggaagcgtacctcaacttcattgccccctccaagcgggagttctacctgtggacagatgggctcagtgccttgctgggcagtcccatgggcagcgagcagacacggctggacctggagcagctgctgaccatggagaccaagctgcgtctgctggagctggagaacgtgcccatccccgagcggccaccccctgtgcccccaccccccaccaacttcaacttctgctatgactgcagcatcgctgaaccttgacagtgtggctgccatgggccacagctgcggccactgcagcagccatgaagggcagtgggtagaggagtgcaggcaccctgaccagcagagattgctgcagaaataaagtctgcttggctcttgggawaaaaaaaaanaaaaaaaaaaaaaaaaaaaaaaaaa

SEQ ID NO: 266 - DNA, 2320 bp, Homo sapiens
tctccctccctcctccttccgtgtgtccctccccgcccggctggaggctgctccggaccgggacgcagagtctgcggacccggcgccgaggcggccacccgagacgcggcgcgcacgctccggcctgcgcccggcccggccatggcggccccccgcccgtctcccgcgatctccgtttcggtctcggctccggctttttacgccccgcagaagaagttcggccctgtggtggccccaaagcccaaagtgaatcccttccggcccggggacagcgagcctcccccggcacccggggcccagcgcgcacagatgggccgggtgggcgagattcccccgccgcccccggaagactttcccctgcctccacctccccttgctggggatggcgacgatgcagagggtgctctgggaggtgccttcccgccgccccctcccccgatcgaggaatcatttccccctgcgcctctggaggaggagatcttcccttccccgccgcctcctccggaggaggagggagggcctgaggccccataccgcccccaccacagcccagggagaaggtgagcagtattgatttggagatcgactctctgtcctcactgctggatgacatgaccaagaatgatcctttcaaagcccgggtgtcatctggatatgtgcccccaccagtggccactccattcagttccaagtccagtaccaagcctgcagccgggggcacagcacccctgcctccttggaagtccccttccagctcccagcctctgccccaggttccggctccggctcagagccagacacagttccatgttcagccccagccccagcccaagcctcaggtccaactccatgtccagtcccagacccagcctgtgtctttggctaacacccagccccgagggcccccagcctcatctccggctccagcccctaagttttctccagtgactcctaagtttactcctgtggcttccaagttcagtcctggagccccaggtggatctgggtcacaaccaaatcaaaaattggggcaccccgaagctctttctgctggcacaggctcccctcaacctcccagcttcacctatgcccagcagagggagaagccccgagtgcaggagaagcagcaccccgtgcccccaccggctcagaaccaaaaccaggtgcgctcccctggggccccagggcccctgactctgaaggaggtggaggagctggagcagctgacccagcagctaatgcaggacatggagcatcctcagaggcagaatgtggctgtcaacgaactctgcggccgatgccatcaacccctggcccgggcgcagcagccgtccgcgctctagggcagctgttccacatcgcctgcttcacctgccaccagtgtgcgcagcagctccagggccagcagttctacagtctggagggggcgccgtactgcgagggctgttacactgacaccctggagaagtgtaacacctgcggggagcccatcactgaccgcatgctgagggccacgggcaaggcctatcacccgcactgcttcacctgtgtggtctgcgcccgccccctggagggcacctccttcatcgtggaccaggccaaccggccccactgtgtccccgactaccacaagcagtacgccccgaggtgctccgtctgctctgagcccatcatgcctgagcctggccgagatgagactgtgcgagtggtcgccctggacaagaacttccacatgaagtgttacaagtgtgaggactgcgggaagcccctgtcgattgaggcagatgacaatggctgcttccccctggacggtcacgtgctctgtcggaagtgccacactgctagagcccagacctgagtgaggacaggccctcttcagaccgcagtccatgccccattgtggaccacccacactgagaccacctgcccccacctcagttattgttttgatgtctagcccctcccatttccaacccctccctagcatcccaggtgccctgacccaggacccaacatggtctagggatgcaggatccccgccctggggtctggtcctcgcccatcctgcagggattgcccaccgtcttccagacaccccacctgaggggggcaccaggtttagtgctgctgctttcactgctgcacccgcgccctcggccggccccccgagcagcctttgtactctgcttgcggagggctgggagaccctccaggacattcccaccctcccccatgctgccaagttgtagctatagctacaaataaaaaaaaaccttgttttccagaaaaaaaaaaaaaaaaaaaaaaaaaaaaaaaaaaa

SEQ ID NO: 267 - DNA, 423 bp, Homo sapiens
aattcggcacgaggattgccctaccccaagtcagtgtgtggtggcccgaaccttaggcaaacagcaaactgtcatggccattgctacaaagattgccctacagatgaactgcaagatgggaggrgagctctggagggtggacatccccctgaagctcgtgatgatcgttggcatcgattgtkaccatgacatgacagctgggcggaggtcaatcgcaggatttgttgccagcatcaatgaagggatgacccgctggttctcacgctgcatatttcaggatagaggacaggagctggtagatgggctcaaagtctgcctgcaagcggctctgagggcttggaatagctgcaatgagtacatgcccagccggatcatcgtgtaccgsgtggcgtaggagacggccagytgaaaacactggtgact

SEQ ID NO: 268 - DNA, 1846 bp, Homo sapiens
  misc_feature (1776): n equals a,t,g, or c
  misc_feature (1816): n equals a,t,g, or c
  misc_feature (1832): n equals a,t,g, or c
cgatttatcaggtttataatgcacttcaggagaaagttcaggcagtgtgtgcagatgttgaaaagagtgagcgagttgttgaatcttgtcaggcagaagtgaacaaattaagaagacaaatcactcagaggaaaaatgaaaaggaacaagaaagaagattgcagcaggcagtgttaagcagacagatgccgtctgaaagcttggacccagcgttcagtcctcggatgccgtcctctgggtttgcagctgaakgcagaagtacacttggagatgcagaggcctcggatcctcctcccccttactctgattttcacccaaacaatcaagaaagtactttgagccactctcgcatggaaaggagtgtctttatgcctcgacctcaagctgtgggctcttccaattatgcttccaccagtgccggactgaagtatcctggaagtggggctgaccttcctcctccccaaagagcagctggagacagtggtgaggattcagacgacagtgattatgaaaatttgattgaccctacagagccttctaatagtgaatactcacattcaaaggattctcgacccatggcacatcccgacgaggaccccaggaacactcagacctcccagatttaactaaacaaaagaaactctccacctagcactgtttttcttcattgcttactgagagggtttttgagaacttaatctggggggagaactgctttctcagataccttaactcccgagaagagagtccttgtgcacagaacttgtgggagcctccatccgctgctctttacctttggatacagtgtgcaagtttcatgacagaatcattaagataatcaaattgtcctaattctggtgcgattcatggatatactggtaaatttaggcaaagtgaaacttatcagcgtagtttctgttctttaaaataaattggaaattagagactaagcacaattagtctataaatgttctataaatcaaaaacttacctcttgcactatcatgccttgaaatttactttttcaaagggaaacaagtttagcagcagccttcaaagaacttctttctatgatgagccaaattcatctttgccagaaaagaaattttgataattccaagaagcctgattagaacaaatcagatataccttctcttgtctgcatgactttgtgagataaaagagagggcttccaacttttttctactagcttgatatgtattatcacttaaaatggttgcctttaaaaaaaaaaagtagrgatactaattaccagtaagtaatcatccaaataaatacgtcataaaataaattaattattttttcyttgatggattacagtgactactgtgttgcactggcacatttatggtctctgttctggaatcttggaggacacacagcagtggagaacagaaggagtgagttttataatgaacagattccagacacggtaggtttagctgagttcatacagaggagatataactcatttagatcttctgacaaatcctagtgttagttttatctgtggaggaaagacatttaataataaactgtttgggaatcttggtgaataaagattcattttcaagctgaataaccatacttattttattttaagttgccatttggggaataagtgcatcccaagagagtctctacacatcctggaagtcgtcaatgatttccctttggaaactactttattttactaatttaaactattttgtactgatgtagccctgaggtagttcatgaaaatgctgtgcactncattccatgggaatgaaatgttggaaagctgatcttttcnggatataaaatgttgnatgatgaaaaaaaa

SEQ ID NO: 269 - DNA, 601 bp, Homo sapiens
  misc_feature (536): n equals a,t,g, or c
  misc_feature (556): n equals a,t,g, or c
ggcacgagctggggaggagggggtggtgacacggtggagacaccggctaggccagggggcctgcccttgggacaggtccagacccatggagccccccgggaggagcagcaggtccacagcgtctcatactctacaccagtattgctgtcctactcaggtccttgactccatgaagcttaccccctcaggcaggctggcagagagcagggaagaggaggaggaggaggagactgaggaagaggaagaggaagacgctcaccagttctgctgtccggcctccgagtgcagtagtccctcctctcggtaactgagaggacaagggccattttctatgcagaagcaaaagccttaaccagsccctccttccccccacccacccccccgcagattcccccatgggaccctgtcccctgcttcaggaaccagatgggcaagcatcgtgccccttcctccccccaccttcttcttggaattcccatccccactgctgtctcctctggactccagcccctgaattaaagaaactggagccctangtccgactaaaatttggganaagcaaacttggacttggacttggaactggatcctcccgtacccg

SEQ ID NO: 270 - DNA, 880 bp, Homo sapiens
  misc_feature (876): n equals a,t,g, or c
aattcggcagagggaaagggtgggggtcagcctccccaaaatcacatggattccccaagtggaaactaggagcagggagttgcttgggtggccgctaacaccaggctactcttattttagcttgctaagttgagatcagctagacctgctttcttttctcctcagtcttgcatttccctcaatacaagctgcagcctctttcctcgtttctagtctcagaaggaaggagagggaagccattctcctctagggactcttcagtctcatttagatgatagtccctttttttctacctccatattagagatggagctccttccttttcctgtttcttaatttttgtcttctcattcctgcttccctctcaccctattgccagttccaccaactagagtgaaagacttcctagccatttcattaaatctattctgtatccaccaggtggcagcatcttgtcatacgtgtcaggacttaggactgcggggtttaggttagatgtcacggaaaaagctagttctgtggtcaggcggcaccaatgagaaaggaatgcagaccctccagatgtatccttgggaaaagcagtaaaccaactaatatttattgaagacctactttgtcctctacatagggtagcttctgtcagggaatcttggttcttcccaagaaacactgattttctttcagggagacttcatgtgttcatttatttccaccacagcagattttaagaaattataatatgtaatatttgatatctataaagagtatatctaacgtgaataaattatgaagcatactaatgagtacctatgacccataacacatatacattaaaacattttaaataccaaaaaaaaaaaaaaaaaaaaaaaaaanaaaa

SEQ ID NO: 271 - DNA, 2484 bp, Homo sapiens
  misc_feature (194): n equals a,t,g, or c
  misc_feature (623): n equals a,t,g, or c
  misc_feature (2396): n equals a,t,g, or c
  misc_feature (2484): n equals a,t,g, or c
aaggagatgaggggccgtgaaggggaacccaggaaactgagtcctgaaagcaaggaggaacttccagaatgaagggcgccgacactccttcctgcctttgctcaagcggttccttcaccccgatcaagttccttcccatttctccatctgggggatcctgaacgtgcacatcctcagagaagccctcctggggntctccaattctagtttattgccccctcctatcgatcccccagcgcgctcatcgggcctgtggacaaggacaggtttgaagagaggattccctggatcgcggaagggctgcaggaatggcacagccccttccgaggatgccaaaggagcccgggcaaaggaaagtggccgtgccgggcctgcctaccactagatccccacccacctatgactgctcagtcccgctctcctaccacacccacctttcccggcccaagccagcgcaccccgctgactccctgcccagtccaaactccaaggctgggcaaggcactgatccactgctggacagacccggggcagcctctgggtgaacagcagcgtgtccgccggcagcgaaccgagaccagcgagccgaccatgcggctgcacagacttcgtgcgcggctgancgcggtgggcctgtgggyttctgctgcttcttgtccggggccagggccaggactcagccagtcccatccggaccacacacacggggcaggtgctggggagtcttgtccatgtgaagggcgccaatgccggggtccaaaccttcctgggaattccatttgccaagccacctctaggtccgctgcgatttgcaccccctgagccccctgaatcttggagtggtgtgagggatggaaccacccatccggccatgtgtctacaggacctcaccgcagtggagtcagagtttcttagccagttcaacatgaccttcccttccgactccatgtctgaggactgcctgtacctcagcatctacacgccggcccatagccatgaaggctctaacctgccggtgatggtgtggatccacggtggtgcgcttgtttttggcatggcttccttgtatgatggttccatgctggctgccttggagaacgtggtggtggtcatcatccagtaccgcctgggtgtcctgggcttcttcagcactggagacaagcacgcaaccggcaactggggctacctggaccaagtggctgcactacgctgggtccagcagaatatcgcccactttggaggcaaccctgaccgtgtcaccatttttggcgagtctgcgggtggcacgagtgtgtcttcgcttgttgtgtcccccatatcccaaggactcttccacggagccatcatggagagtggcgtggccctcctgcccggcctcattgccagctcagctgatgtcatctccacggtggtggccaacctgtctgcctgtgaccaagttgactctgaggccctggtgggctgcctgcggggcaagagtaaagaggagattcttgcaattaacaagcctttcaagatgatccccggagtggtggatggggtcttcctgcccaggcacccccaggagctgctggcctctgccgactttcagcctgtccctagcattgttggtgtcaacaacaatgaattcggctggctcatccccaaggtcatgaggatctatgatacccagaaggaaatggacagagaggcctcccaggctgctctgcagaaaatgttaacgctgctgatgttgcctcctacatttggtgacctgctgagggaggagtacattggggacaatggggatccccagaccctccaagcgcagttccaggagatgatggcggactccatgtttgtgatccctgcactccaagtagcacattttcagtgttcccgggcccctgtgtacttctacgagttccagcatcagcccagctggctcaagaacatcaggccaccgcacatgaaggcagaccatggtgatgagcttccttttgttttcagaagtttctttgggggcaactacattaaattcactgaggaagaggagcagctaagcaggaagatgatgaagtactgggccaactttgcgagaaatgggaaccccaatggcgagggtctgccacactggccgctgttcgaccaggaggagcaatacctgcagctgaacctacagcctgcggtgggccgggctctgaaggcccacaggctccagttctggaagaaggcgctgccccaaaagatccaggagctcgaggagcctgaagagagacacacagagctgtagctccctgtgccggggaggagggggtgggttcgctgacaggcgagggtcagcctgctgtgcccacacacacccactaaggagaaagaagttgattccttcattcamtttsgscattcattcatanttccgtccatccattcagaaagcwtttatttaagattttayttcagggmtwgatkggcccatattgttaatttccccgttttttgggn

SEQ ID NO: 272 - DNA, 751 bp, Homo sapiens
agccaccgcgtgacccactgcccctatgccgtggccctacccgaggtggccccagcccagccactcaccgaggcactgagggctctctgccacgtggggctctttracttcgccttttgtgccttgtttgactgcraccgccctgtggsgcagaagtcttgtgacctccttctcttcctgagggacaagattgcttcctacagcagcctgcgggaggccaggggcagccccaacactgcctccgcagaggccamcctgccgaggtggcgggcgggtgagcaggcccagcccccaggggaccaggagcctgaggctgtgctggccatgctcaggtccctagacctggagggcctgcggagcacgctggccgagagcagcgaccacgtggaaaagagtccccagtccctcctgcaggacatgctggccacgggaggcttcctgcagggggacgaggccgactgctactgagcagaaccagagtctgccactggggctcaggaccaagggaggcagcaccatgtccttctgtgggacactgccagccccaggctccagcccagcccggtggatcctctggggaagccaggaccaggagagaagcaaggtcaagaaatcccacagtttgatgtattaaagaaatgacttatttctactcaaaataaatggcattgaagtctttctttaaccctttatgagttaatttaataataatgatctgagacaaaaaaaaaaaaaaaaaaaaaaaaaaaaa

SEQ ID NO: 273 - DNA, 3309 bp, Homo sapiens
  misc_feature (3279): n equals a,t,g, or c
agaagcaggagggagaagggcagacaggggtcggttgagccagggtagaaaccaaggggagccagggtagaaaccaaggggtcagggctgggctggaggacacggctgaggtcctcccaaaactgggccratgtggtgtgacatccccaccagcctcagatgagacgggccaggacgcccagccacagcaagccctgtccctttgccggatccccaaacactagagaagctctcctaacccaaggcggagaatgaaggtggtggcggcagaggaggagggcagcagctgagaggccagggacagggtgcctcgccaagctgtctgaggtctgtcccaggtggcccaggtggtgcaggtagaacagggtgaggagagggggtcggctcarcaggaggaggctgtggctgcagagcctggrggagcttttaggtgttgagatggggcagctctgaatcctagaccctggaatagcctgtcccttttctctgggtctcgtggtggagccatgatctgggctgctctcttggggacactgggtggtggttacacagttgacctctgcctggctcccccttggtgcaactcctgcctccatcccccttgctggggtcccctcatccacttgagggcgcctgagggccaggarcagcaggcaaggagcctgggtctaggctaagggggtktktgcycacctcctccctgacccttaacactcctgtcctgcccagaccaacagagagagctgtccctgagaccccggagagaagcagctgccgaaagctgcagcctttccgcactctgagaccatgatcttcctcctgccaggggagagccacccacaggccatgtccagccccacttccctcagcccccagggyttccttctggcccctctgaggattccctagggctgccccgcagaggggyttccccaagctctgttttgaagcctgcaatgtggaaaagtgagaagtcagagggaacaggacaggtgcagccgggctctgaggccacacctcacacctcgctgttccccaacatcccctgagcagtgtgagctcatctcaccagatgagaagaggccctgtgcatttyttttgtttgtttgttgctgttttcccccacccatccagttctcctcagcaaagcaaattccttaacacctttggtggagaatttcttacccagacttggggctgtgatgcccttcagtgcgtggtgagtgcagcgtgtgtgcgtgtgcctgtgtgtgaacctgggggccatcctggtggcctgggagcgtgaggagaggccccctgtgtgctgggtgagtggtgggtgtggggtcaatgcagtgaggctctctgggtgaggctcccaacctggcagtccccagcctcccagcatctgtgagcgtctgttggactttacagaagagcctcatccygtctgcccctcactctgccctggaatcaacatcttccgagtccttcttgggggaaatagcagagccccacttaactccataaactgcttcccattccgcagcccagttctgattgttgaggtgtcgcgtcgttccaggtcccccagtcccctctttctcctgtcctctctctgtccttcacctccccactccagccccggctcagttcagggaaatgctgttccayatcagccctctgctctctgaggcagccgcgcctctgactcggagctacttgaaacttctgctcttgctaggattggagtctacctatctcttccatttgtcccagctggagttctggaactttcctcctcggggtgggggtgggggttgttaaggatgctggggggcctggggaaggaaggagttcagaggaagggtgtcccctgtcctcttgatgtcaccctccgctcctgggacacgtgctctctctgtctctgggtcttctggctgtgcacgtttgtgtgtccttgtaaatatgttttaggaagaaagcaaaagggactgaactagcctctggtaggattgcaggggtccagccttgcctgtttccgaagcccccacactgcctttcgccccactgagactggtcccctcaaaaggtagacaaaacagcagctccctgtggagctgaagggcggcctcaaagtggctttttgttagacaaggttaaggtttcctcatgagcaaggttgcagatcggtccttcctcagctccttgatttgtgaccttgaccaaggggcctgccacccagcccctccagtgccctctcctcgatgcctcgctccttcctgcccccactcccctggcttaggcaggtaggggaattagggccatgctggaagaagcttaaccatgtgttcaaagaacggtttcttgcttgcttggtcctggaactccccttggctgccccaggcctccttggcccatgggtgctgggggaggtggatgtcagatctggtaggttgcagcagagaaaataaatgtgccttgagagaccactcagagagggtccaagggtgatggagaaggaagcatggcctgggagcttggaaggraggggtggtgggtggcggcatcttgactgccccctgttgtcccacacgtggggggtggtcacccccttcactccagcccgcctgccttcagccttccatgagcttcacctgcttccaacttcactttggagggggtggggtccgttggcatcaacacggggaccctctgcttcaccaaagcccgagccctcagcccctggggagaacaaatggctgagctttgatacctggggtcgtcgagaggctgcgggctggcggcagtcccaggggagagacaccacagaaggagacccagacatcccgaggaagttcccagcagagcaaactgctttccagcctgaagcctgcttaaactgtgtgatgtgcaataactgagcttagagttaggaattgtgttcaagtgcttggatttccgtctgtagatttaactgctgaaattgtatctctcagtaattttagatgtcttttaaaaaattgaaaaacaaagtgttagactgtgtgcgtgtgcgttgatgggcactcaagagtcccgtgagtcatccagccctgcctttcccctgcgcccccatcctctcacgtcccgcccygcctccacttggggaccctgcctcgtgtcgtctttatctgcctattactcagcctaaggaaacaagtacactccacacatgcataaaggaaatcaaatgttatttttaagaaaatggaaaataaaaactttataaacaccaaaaaaaaaaaaaaaaacccngggggggggccggtaacccatttcgcctaa

SEQ ID NO: 274 - DNA, 843 bp, Homo sapiens
  misc_feature (780): n equals a,t,g, or c
  misc_feature (833): n equals a,t,g, or c
cgcggacgggtgagaggccgcggcggcaggtccacctgggcttgcgaaggcacagattccccgtccacagctcacgaccagatgcaccagcaggagtccacatcgaggacgtcctccgggcactcccacgaccagtgaccaggagttaaactttgggatgtgcccgtgatgttggaccacaaggacttagaggccgaaatccaccccttgaaaaatgaagaaagaaaatcgcaggaaaatctgggaaatccatcaaaaaatgaggataaygtgaaaagcgcgcctccacagtcccggctctcccggtgccgagcggcggcgttttttctttcattgtttctctgcctttttgtggtgttcgtcgtctcattcgtcatcccgtgtccagaccggccggcgtcacagcgaatgtggaggatagactacagtgccgctgttatctatgactttctggctgtggatgatataaacggggacaggatccaagatgttctttttctttataaaaacaccaacagcagcaacaatttcagccgatcctgtgtggacgaaggcttttcctctccctgcacctttgcagctgctgtgtcgggggccaacgcagcacgctctgggagwgacctgtggcccaagacgtggccctcgtggagtgtgctgtgccccagccaagaggcagtgaggcaccttctgcctgcatcctggtgggcagacccagttctttcattgcagtcaacttgttcacaggggaaaccttggaaaccacagccagcagttcagggngaatggtccatctgagccttttgtgcagttgctgatgtggagttcgatggggncccaaactgt

SEQ ID NO: 275 - DNA, 2028 bp, Homo sapiens
tcggcacgaggtttttgatttatggataatttcttaagagtacacactttagatacacaaataatcgttcatttaccatctttaggatcattgaaactcatctcactaaagaaagttcacttgaacctctttatagcattgatactaggtgaacagaaattacctgactaataatttgtctaacatcatatatcagaattttattgtatatgatgaacaaaacttaaaattttttaaatttaattyttaaatactgtttcagagttctaaaaaggcagttttttaaaaaacttaagttgataaaaactgtaagaataatttagcagaaatagaaccagaatgtagaagagtagtcatgtaacagcagtaataacatacttcagcttccatataggaatagaagtggtagagccaaaagtgatttaggaaaagttataaggtacaggttgagtatcccttttccaaaaatgcttgggacaagaagtatttcagatttcataatttttttcaaagtttggaatatttgcattatacttaccagttgggcatcccaaatctgaaatctgaaatgttccatgagcatttcctttgagtgtcatgttggcactcaaaaaggttcaacattgagtccacttaacacttaggtgttagaagacctaactttctgtaacaattaaccttatactttgtttgtcatcgaatatttgttgaatgcatgtcaggtaatggtcttgattgtgatagcttcaaggtggaacatactgtaatctccagatgctaggaagttagtctaataattcactgcagaaaattgattaagtggctgtccttttaattaagagtgtggagtcataaacttaagttcttcatatagtgacaagagtccttagagattgttattcaagttccttagaaattgttatttaggtataatatcatcttgtctttgactagagcttgaaaccttgttatctgattgtgtaccactccaaattccctgccttctgcaagttgaatgtcttgctgaatgtgtctaggggttcatcttcagtaatcgacattccactagtgccatagttaacttcatgacatgtagacattcaaaacttgagccttggatgttcctgtggacctgacagttaaaaatataaagaacctaggattcaattccaactttctctgtttgccttgggttgaataacttatcttktggagaatagctttaagtggcttagacactgataaaattcagctgtgttgttgacgctcatctcttttgtcttacgcttagccatatttaaatcttgaatttaatagagtctagtgaaaaaaatgagtgggaagaatgaatataaaagtaataatataaggaaaaagggaaagtaaactatttagaatgtagttttgttatattcccagcatttcaatatttattagttacttgtaaattactgtggctgtgtagtttataaatgtctgtgcactatattaattagaagaccatagaacatgccagcaggttggctaatgctatgggggtttttaccacagttgccattgtggaagaaattatttggtacattaataaaaaaagttggtaaaacatgrttttatacctcagtgtataagatgtgcaagacaaatatgcttatttccttttctagaatataagtgatattatttgcttatgacactaacactattaatgacaggagtcaatcagcctttacagctatcaaaatataatgagatcccaatgatgattcttttttactttgaatgttaattagtttgggactttgattggctggcaaacattttatcattgtcagaatttaatttagatttcaaaaatagcttacaggattttaaacatggtgtggtattctaaagccttttttttaaaaaaagagatctttttgagagaaacaaatgaggattgtaaagtttggggacttacctctgtagcattgtgaaaataaactttgattaagctgaaaaaaaaaaaaaaaaaaaaaaaaaaaaaaa

SEQ ID NO: 276 - DNA, 1455 bp, Homo sapiens
  misc_feature (759): n equals a,t,g, or c
  misc_feature (1408): n equals a,t,g, or c
tcgacccacgcgtccgcggcaatggcggtggcgctgcggggattaggagggcgcttccggtggcggacgcaggccgtggcgggcggggtgcggggcgcggcgcggggcgcacagcaggtcagcgggactatgatctcctggtggtcggcgggggatctggtggcctggcttgtgccaaggaggccgctcagctgggaaggaaggtggccgtggtggactacgtggaaccttctccccaaggcacccggtggggcctyggcggcacctgcgtcaacgtgggctgcatccccaagaagctgatgcaccaggcggcactgctgggaggcctgatccaagatgcccccaactatggctgggargtggcccarcccgtgccgcatgactggaggaagatggcagaagctgttcaaaatcacgtgaaatccttgaactggggccaccgtgtccagcttcaggacaraaaagtyaagtactttaacatcaaagccagctttgttgacgagcacacggtttgcggcgttgcaaaggtgggaaagagattctgctgtcagccgatcacatcatcattgctactggagggcggccgagataccccacgcacatcgaaggtgccttggaatatggaatcacaagtgatgacatcttctggctgaaggaatcccctggaaaaacgttggtggtcggggccagctatgtggcctgggagtgtgctggcttcctcaccgggattgggctggacaccaccatcatgatgcgcanccsccctccgcggcttcgaccagcaaatgtcctccatggtcatagagcacatggcatctcatggcacccggttcctgaggggctgtgccccytcgcgggtcaggaggctccctgatggccagctgcaggtcacctgggaggacagcaccaccggcaaggaggacacgggcacctttgacaccgtcctgtgggccataggtcgagtcccagacaccagaagtctgaatttggagaaggctggggtagatactagccccgacactcagaagatcctggtggactcccgggaagccacctctgtgccccacatctacgccattggtgacgtggtggaggggcggcctgagctgacacccacagcgatcatggccgggaggctcctggtgcagcggctcttcggcgggtcctcagatctgatggactacgacaatgttcccacgaccgtcttcaccccgctggagtatggctgtgtggggctgtccgaggaggaggcagtggctcgccacgggcaggagcatgttgaggtctatcacgcccattataaaccactggagttcacggtggctggacgagatgcatcccagtgttatgtaaagatggtgtgcctgagggagcccccacagctggtgctgggcctgcatttcttggncccaacgcaggcaaattactcaaggatttgctctggggacaagtgtg

SEQ ID NO: 277 - DNA, 1923 bp, Homo sapiens
  misc_feature (1814): n equals a,t,g, or c
ggccctgcccacccaggccgcaagagctgccgggacggtccccatcttcttggagcgctttaggctggccggcggcgctgggaggtggagtcgttgctgttgctgtttgtgagcctgtggcgcggcttctgtgggccggaaccttaaagatagccgcaatggctgaaaatggtgataatgaaaagatggctgccctggaggccaaaatctgtcatcaaattgagtattattttggcgacttcaatttgccacgggacaagtttctaaaggaacagataaaactggatgaaggctgggtacctttggagataatgataaaattcaacaggttgaaccgtctaacaacagactttaatgtaattgtggaagcattgagcaaatccaaggcagaactcatggaaatcagtgaagataaaactaaaatcagaaggtctccaagcaaacccctacctgaagtgactgatgagtataaaaatgatgtaaaaaacagatctgtttatattaaaggcttcccaactgatgcaactcttgatgacataaaagaatggttagaagataaaggtcaagtactaaatattcagatgagaagaacattgcataaagcatttaagggatcaatttttgttgtgtttgatagcattgaatctgctaagaaatttgtagagacccctggccagaagtacaaagaaacagacctgctaatacttttcaaggacgattactttgccaaaaaaaatgaagaaagaaaacaaaataaagtggaagctaaattaagagctaaacaggagcaagaagcaaaacaaaagttagaagaagatgctgaaatgaaatctctagaagaaaagattggatgcttgctgaaattttcgggtgatttagatgatcagacctgtagagaagatttacacatacttttctcaaatcatggtgaaataaaatggatagacttcgtcagaggagcaaaagaggggataattctatttaaagaaaaagccaaggaagcattgggtaaagccaaagatgcaaataatggtaacctacaattaaggaacaaagaagtgacttgggaagtactagaaggagaggtggaaaaagaagcactgaagaaaataatagaagaccaacaagaatccctaaacaaatggaagtcaaaaggtcgtagatttaaaggaaaaggaaagggtaataaagctgcccagcctgggtctggtaaaggaaaagtacagtttcagggcaagaaaacgaaatttgctagtgatgatgaacatgatgaacatgatgaaaatggtgcaactggacctgtgaaaagagcaagagaagaaacagacaaagaagaacctgcatccaaacaacagaaaacagaaaatggtgctggagaccagtagtttagtaaaccaattttttattcattttaaataggttttaaacgacttttgtttgcggggcttttaaaaggaaaaccgaattaggtccacttcaatgtccacctgtgagaaaggaaaaatttttttgttgtttaacttgtctttttgttatgcaaatgagatttctttgaatgtattgttctgtttgtgttatttcagatgattcaaatatcaaaaggaagattcttccattaaattgcctttgtaatatgagaatgtattagtacaaactaactaataaaatatatactatatgaaaagagcaaaaacagtttttgattttttttttctttttgtacccaaagcatttaggaaagaactagaatattagctattgacgatgggcctttcccacaggccatttatggtgtctcctaggctgggctttgnatatttacacaggaaagttgggtaacactagaaataattacttggtcacaaagccttccctttttttttccttttcgagactgagtctcactcctatcgcgcagctgga

SEQ ID NO: 278 - DNA, 1380 bp, Homo sapiens
  misc_feature (1293): n equals a,t,g, or c
  misc_feature (1297): n equals a,t,g, or c
aggggaagaaggggtgggctccccttctgggatccttgccacccccctccgcagcgcgcgcggaacgacacacacacacacacacacacacacacacacacactcgcatactcatgcacattttccttcatttccagatcctttatttcagagcagcccattttcctctggattcattgatgaatacaagtacccacacctttggccagtaatgtcagttacctgctgcaggttctgtgtatgaggccttcatgaacggttaccttctccatacactagggaagcatttgtcagactctgcagactgggttctagagaggcagagtctttaagagtattcatttcttctggaaggtggagctttacccaaagtggaagttagccttgctcaaagatgtgttttgtggtaggtggtaaaaataaataaataaataaataataaaaaaagaaacatgtattggaggtaatttgacactgctgctggcagtagttctctattcaccattttaaagcccattcaggttctctcttcctgaaaagaactgattgctgtgtttacatgaaatgacattggagtcagatggtctgttttaaagatttccatgacagcctcttttcctgagttggagagattggaggtggtctatccgtacgatgtggaatcaaacggtgggtttcttagtagctaaagaagccatgtacttctagtgtgtttctcagaatatcaactcatgttcttcagatgcttttctttttttaatggtgagggaaaaggtataatttgggattccacagtgccttgcatatagtaggcgcccagtaaatacttgttgaagcaaaccaagtttcccaagtcctcatctcttatagtgaccaagacatctttctcctctgaagggcttggcagttgtggctaaaaaataagcagtatcattatttgcttgaaatcatatatacagtttgtatgaatttcagtatgttgccaagacatgattttttcttattgtattttctgtaaatatttctggcactgaactgtaaagtaaaggcaaagtgtaaatatgaaggcgtgcccgtgccccttgcctcctgtgtttcatcttcgtcggttagggaagaaggtccagaggtttgtttgtatttatgccgatcctttgtccagaagaagcccatggaatattgaatgtaatacatttagtcaattaaattttaaggagattcttatctaataactttgtgtgtgcttttggatacaggctgaggctttactcctacactggtgctgttaatttncacntttcaggggatgtctgctcggctttggctgccctttataatttagatctgtagtttaaatgaacattaaatgagtatttcatg

SEQ ID NO: 279 - DNA, 1018 bp, Homo sapiens
  misc_feature (818): n equals a,t,g, or c
  misc_feature (1017): n equals a,t,g, or c
  misc_feature (1018): n equals a,t,g, or c
catggccgcgccggcccgggcctcatctcggtgttctcgagttcccaggagctgggtgcggcgctagcgcagctggttggcccagcgcgcasatgctgcctggcaggggcccgcgcccgtttcgcgctcggcttgtcgggcgggagctcgtctcgatgctagcccgcgagctacccgccgccgtcgcccctgccgggccagctagcttagcgcgctggacgctgggcttctgcgacgagcgcctcgtgcccttcgatcacgccgagagcacgtacggcctctaccggacgcatcttctctccagactgccgatcccagaaagccaggtgatcaccattaaccccgagctgcctgtggaggaggcggctgaggactacgccaagaagctgagacaggcattccaaggggactccatcccggttttcgacctgctgatcctgggggtgggccccgatggtcacacctgctcactcttcccagaccaccccctcctacaggagcgggagaagattgtggctcccatcagtgactccccgaagccaccgccacagcgtgtgaccctcacrctacctgtcctgaatgcagcacgaactgtcatctttgtggcaactggagaaggcaaggcagctgttctgaagcgcattttggaggaccaggaggaaaacccgctgcccgccgccctggtccagccccacaccgggaaactgtgctggttcttggacgaggcggccgcccgcctcctgaccgtgcccttcgagaagcattccactttgtagctggccagagggacgccgcagctgggaccaggcacgcggccnatggggctgggcccctgctggccgccactctccgggctctcctttcaaaaagccacgtcgtgctgctgctggaagccaacagctccggccagcagccctacccggggctcaacacacaggctgtggctctggacatccggatattaaaaggagcgttgctggaaaaaaaaaaaaaaaaaaaaaaaaaaaaaaaaaaaann

SEQ ID NO: 280 - DNA, 1192 bp, Homo sapiens
  misc_feature (1105): n equals a,t,g, or c
  misc_feature (1130): n equals a,t,g, or c
  misc_feature (1154): n equals a,t,g, or c
tccgggaattcccgggtcgacccacgcgtccgctctgtttatatagcaggtgtcacaactaacttgtctttagccttggtgctttgatccttctatattttgaccccacaggtgtggtccggtttacttaatcaggacatgggcctaagaacaaaccttttcccttcatgataacatccatagacaacttattagaagggactagagtttttgcaaatttccctgctggatggggcctatagctatacttagtatatgcctaaacatggtaattggatagtaaatggttttctagttccattgctgtatatttgcctaaatggacttgtgttcaaattatttcttcaattgtcatagataatcctgtaccaaatggggaagaattaggaaataatcatgttgtctaatggtactctggattcagggcagcaactgccatttaaatgttgtcttgttcatttctaaatctgttccatgaagtttaggttttccctgaaactaagttgaattatttccaaaatgaaacaggcttctcagggacatatccacttcttcccagtctgcctttggattaaagcaccaagcagagaccacattaattccctttgctatactgtgatccttagtatgttaattcttaagaaaccaacatatcactgaaagaaggctggcagaacgcaagtgcattttttcactgtgggaagaaagatcaagtgacgtattattttttcctggttgtcacttaatgggctgagtaaaaagcttgaaaactcagactttcggtcttggttctgccactcattggttatgaggaggcccagagcaggtaagttcaccttcctggccttactttcctgatgtgtaatacggaattacttcacagtagcatgacagtataagacaccagcagtagatacaactatgatgacattccatgagttggtatttttagttctaactgctaaatttgttctctttacgggacagatttctaataaagtgcttggtcttaaaatacatggttggacagaggtgccctatcccttaactatggaggcaggtgctaccttttggggatatttatttttaaatttttaatactttnggtactccaattgtccagtgttccntgggtgttgtattttttatttttnggggatagtgggggggccttaagggggaggagggatag

SEQ ID NO: 281 - DNA, 1755 bp, Homo sapiens
aaattacaggaacggagtaagaacgtaagaaatcgcaaagcacgtgaacgtatgggaatctcactgttcttggcccttctcccgacccgtagccctgctctgctacgactgcgtgggtgaagtcgtctataaaaactcatctctgcgcgtctcttcgccacattcgcttcctgctttcggtgtgtctgttgtgtcttgttgcgggcaccgcagtcgccgtgaagatggcgtctaccagccgtttggatgctcttccaagagtcacatgtccaaaccatccagatgcgattttagtggaggactacagagccggtgatatgatctgtcctgaatgtggcttggttgtaggtgaccgggttattgatgtgggatctgaatggcgaactttcagcaatgacaaagcaacaaaagatccatctcgagttggagattctcagaatcctcttctgagtgatggagatttgtctaccatgattggcaagggcacaggagctgcaagttttgacgaatttggcaattctaagtaccagaatcggagaacaatgagcagttctgatcgggcaatgatgaatgcattcaaagaaatcactaccatggcagacagaatcaatctacctcgaaatatagttgatcgaacaaataatttattcaagcaagtatatgaacagaagagcctgaagggaagagctaatgatgctatagcttctgcttgtctctatattgcctgtagacaagaaggggttcctaggacatttaaagaaatatgtgccgtatcacgaatttctaagaaagaaattggtcggtgttttaaacttattttgaaagcgctagaaaccagtgtggatttgattacaactggggacttcatgtccaggttctgttccaacctttgtcttcctaaacaagtacagatggcagctacacatatagcccgtaaagctgtggaattggacttggttcctgggaggagccccatctctgtggcagcggcagctatttacatggcctcacaggcatcagctgaaaagaggacccaaaaagaaattggagatattgctggtgttgctgatgttacaatcagacagtcctatagactgatctatcctcgagccccagatctgtttcctacagacttcaaatttgacaccccagtggacaaactaccacagctataaattgaggcagctaacgtcaaattcttgaatacaaaactttgcctgttgtacatagcctatacaaaatgctgggttgagcctttcatgaggaaaaacaaaagacatggtacgcattccagggctgaatactattgcttggcattctgtatgtatatactagtgaaacatatttaatgatttaaatttcttatcaaatttcttttgtagcaatctaggaaactgtattttggaagatatttgaaattatgtaattcttgaataaaacatttttcaaaactcaagtttttgttatatgttacatgtaacttatgatacataattacaaataatgcaaatcattgcagctaataaagctgatagactttatttccattacttatatatacatagttttttattttaataaatttatggaaagagcaaaagcttttgagaaccattgttaacatcaacatcatagtttccagtttgaaaggatgtgtatgtgagatttattatgtatattattaaacaagaagtgatgagcttggccttgaaaggcaccagcttgagagacattaaaatgttctaagtaaaaaaa

SEQ ID NO: 282 - DNA, 1093 bp, Homo sapiens
  misc_feature (90): n equals a,t,g, or c
  misc_feature (970): n equals a,t,g, or c
  misc_feature (1081): n equals a,t,g, or c
cccttcttggttgcgcgcccgttcctcgcgttcttggcytgccagcccccgaggcccgcagcctccgcggatccgggcccgctcggcccntcccatggaaggtgctcgggtcttcggggcactgggtcccatcggtccctcctcacctgggctcaccctcgggggtctggccgtgagcgagcaccggctcagcaacaagctgctggcttggagcggcgtcctcgagtggcaggagaagcgcagaccctactctgactccactgcaaagctgaagcggaccctgccctgccaagcctacgtgaaccaaggcgagaacctggagaccgaccagtggccgcagaagctgatcatgcagctgatccctcagcagctgctgaccaccctgggccccctgttccggaactcccagttggcacagttccacttcaccaacagagactgcgactcgctcaaggggctctgccgcatcatgggcaacggcttcgcgggctgcatgctgttcccccacatctccccctgtgaggtgcgcgtgctcatgctcctgtactcgtccaagaagaagatcttcatgggcctcatcccctacgaccagagcggcttcgtcagtgccatccggcaggtcatcaccacccgcaagcaggcagtgggacctggtggtgtcaactcaggcccagtccagatcgtcaacaacaagtttctggcatggagtggtgtcatggagtggcaggagcccaggcctgagcccaacagtcggtccaagaggtggctgccatcccacgtctacgtgaaccagggggagatcctgaggaccgagcagtggccaaggaagctgtacatgcagctcatcccgcagcagctgctgaccaccctagtgccgctgttccggaactcgcgcctggtccagttccacttcaccaaggacctggagacactgaagagcctgtgccggatcatggacaatggcttcgcnggctgcgtgcacttttcctacaaagcatcgtgtgagatccgcgtgcttatgctcctgtactcttcagagaagaaaatyttcattggcytcatcccccatgaccagggcaantttgttcaaagg

SEQ ID NO: 283 - DNA, 1556 bp, Homo sapiens
  misc_feature (1324): n equals a,t,g, or c
  misc_feature (1339): n equals a,t,g, or c
ggcacgaggggaatcctccacgtggctgtcccagcacgaggaacccatgcacagtgctgcagaaactggacagttccggacagcggwcaaggcaaggawgtcatgcttgaaggccagggtagacttgagagagttcacattccactgtcagcaccagcctcagcaactgtgcagagacctacaggcccacagccagtggcctgtccgcattgccctgtgcccacaagcaacagtccacagcccttggtggcttctgttccttgtcccctcggcttctcttcgcagccatcaggactaggtttgtgcaggaaggtgatgcccactggaactctcctcacacctggcagcttcatggatgttgtatctgaactaaggaccagaggctgccagatgtttctggctcctcacgtgtccttcaggacagaacagaagcacaaagactcagccaagagttctctttattccctttgatcctcccccaaggtgagggcttaggcagctgtagaaccccaggaaagaacggaatccaggcaatctgtttagagaccccccactccaaatttatccttttcctttccttcccctaagatgtttccagggccctctggtgcccacactgtcctcttccttccacttgggggtggggaaatccttcctgcgaggtcagggcatttctctacaaagtggcctgaatgaggccaggccctgagaaggagccaccagctggaggaaaggggctccaagccttgcttttaacacccctgcaaaacccccaccctcccaagatgttcacaaaaggtgagaaattcaggtacgaaaccatcaatggacaacttgaaaatgcatgttcctcaggcctatgcagttcccagagactcttgacaccggtctctgctgaggctcccagcctcagtttcccccacagcagcacgggccccactgtgctgctcttcaggtccccacagccctgcctttggttcctggacatttggtattctgccctccactctggtactatcagagtagggcaggctctggattaaagcttttagccggtctaaagctactttcttcaaagacagtgggaggagaggttgctggggcatcagccctgcttcccacagctccttaggcaagagcttacccagcagctgtgagcaccaagctggccagcagaggctgggggaggactttcaggccaacacctgccccagctgagtttgggactgtccttaagcgaggtctggagagaggcagcggcagcagccggacggggagcaggccaagccggaaccacagcctgcaggtgtgggtgtttgtcatntgctgagatgccagngcaccagcaagggggatatgttggcagtgatgtctggcttcggagggtacagtcctggctcccagacaaggggcggggagaacactgtgtccttccagaggctgtaccacactcccactgctgtcacccttcactgaagcctcgagcctcggtagggcctccctcttctccctgtcctatcaagacttacagcaaggtcccaggttgacagggagac

SEQ ID NO: 284 - DNA, 1029 bp, Homo sapiens
  misc_feature (828): n equals a,t,g, or c
  misc_feature (958): n equals a,t,g, or c
  misc_feature (972): n equals a,t,g, or c
  misc_feature (976): n equals a,t,g, or c
  misc_feature (987): n equals a,t,g, or c
  misc_feature (1007): n equals a,t,g, or c
tgatggtgtggtccaatgagcgggtcatgggttgggtgtccgggctgggctgaaggaatttgccacgaacctcacggagagcggggtacacggggcactgctcgccctggacgagaccttcgactactccgacctggccttgctcctgcagatccccacgcagaatgcacaggcccggcagcttctggagaaggaattcagcaaccttatctccttaggcacagacaggcggctggacgaggacagcgccaagtctttcagccgctccccatcctggcggaagatgttccgggagaaggacctccgaggcgtaactcccgactcagctgagatgttgccccccaactttcgttcggctgcagcgggagccctgggctctccggggctccctctccgcaagctgcagccagaaggccagacttctgggagttcccgggcagacggcgtttcggtccggacctattcctgctagtgcaggcctccaggtgacctcactcggacggaagaatcttcccgaggctgggctgttccctctcctgcccggactgtggcctcgccggggagagcgggcgggggagctcgcgccgaggactggaccatctgtacagaccagcgggagtgcgcgcgcccgcctcgcacagggccggggctggaccaaaccacatgaactggactgagagggggaagaagcggggaggaagaaatcccgccccaaacgtccgctttccttttctctactttgtaatttattgatcagtttctgttgggagacgggtgtcctttacccgcgggaagggggcggggcttccctcccgggccgcatgcggngagargctgctccctcccctttttcctgcccagtcgcggggcccaagtctttccttcttcgtccgaaaggaggggagggggactcgtgctacaagcctcgccccctgtgccactcagtccgacccgccgngttccggttcgccnggtncccccgggttnatctggcgggcggggtcccnttgtgccttccccccgtgtttt

SEQ ID NO: 285 - DNA, 1583 bp, Homo sapiens
  misc_feature (1411): n equals a,t,g, or c
  misc_feature (1531): n equals a,t,g, or c
  misc_feature (1557): n equals a,t,g, or c
tgtgtctgcgttgagggtgttgagggtccacgctgtgacaagtgcacgcgagggtactcgggggtcttccctgactgcacaccctgccaccagtgctttgctctctgggatgtgatcattgccgagctgaccaacaggacacacagattcctggagaaagccaaggccttgaagatcagtggtgtgatcgggccttaccgtgagactgtggactcggtggagaggaaagtcagcgagataaaagacatcctggcgcagagccccgcagcagagccactgaaaaacattgggaatctctttgaggaagcagagaaactgattaaagatgttacagaaatgatggctcaagtagaagtgaaattatctgacacaacttcccaaagcaacagcacagccaaagaactggattctctacagacagaagccgaaagcctagacaacactgtgaaagaacttgctgaacaactggaatttatcaaaaactcagatattcggggtgccttggatagcattaccaagtatttccagatgtctcttgaggcagaggagagggtgaatgcctccaccacagaacccaacagcactgtggagcagtcagccctcatgagagacagagtagaagacgtgatgatggagcgagaatcccagttcaaggaaaaacaagaggagcaggctcgcctccttgatgaactggcaggcaagctacaaagcctagacctttcagccgstgccgaaatgacctgtggaacacccccaggggcytcctgttycgagaytgaatgtggcgggccaaactgcagaactgacgaaggagagaggaagtgtggggggcctggctgtggtggtctggttactgttgcacacaacgcctggcagaaagccatggacttggaccaagatgtcctgagtgccctggctgaagtggaacagctctccaagatggtctctgaagcaaaactgagggcagatgaggcaaaacaaagtgctgaagacattctgttgaagacaaatgctaccaaagaaaaaatggacaagagcaatgaggagctgagaaatctaatcaagcaaatcagaaactttttgacccaggatagtgctgatttggacagcattgaagcagttgctaatgaagtattgaaaatggagatgcctagcaccccacagcagttacagaacttgacagaagatatacgtgaacgagttgaaagcctttctcaagtagaggttattcttcagcatagtgctgctgacattgccagagctgagatgttgttagaagaagctaaaagagcaagcaaaagtgcaacagatgttaaagtcactgcagatatggtaaaggaagctctggaagaagcagaaaaggcccaggtcgcagcagagaaggcaattaaacaagcagatgaagacattncaaggaacccagaacctgytaacttccsattggagttctkgaaacagcagctttctggaggaaaccttgttcaacgcgttcccagggcatccagcgagtttagagaggatgtgggaaganctttaagcggaaagctggcccaaaancccgggggaggccgaattttttggaa

SEQ ID NO: 286 - DNA, 1177 bp, Homo sapiens
gctcaaaatgtttaccaatgttttaagatgtctttatcaagcaaccgtatcagcagagaaaagayatctcaaaatgtttaccaatgttttaagaagctttgtgtgatattcttccaaatgtagttaccaaatataatatggtagaaaaggctaaatcatacttaatgagcaaattgaagtaagcttttaaagtatatttctcttttggtgaaaggccaatggagacattgtgaatttaagtgaacatttgcctcaagatgttaactataaacacactgcatacaattttcttctgaataacaaatgaatgcttattgctgcatgatgtaagcaaaagtcattatttttcctattcatttgaaataagttatggcttaaaatgcttttggagtttatttctcaaaattaaaatctggtcacatgagctttagtttgttttctggtttaaaaaataaaaaggtttctcttaacagtatttccagtgacaatgcaaggtaagtatatcaaaggaaatcaacagttgtgcttgggggctttttgttatgggatattgatttcttgttttttttccgtaacattgtctgctgcaatttaaataaaaattacgacattttaagatatttcatagacaaaccaaacaaaaatatatgtttttactttaaagtgaatgtttttctcttcagctgatctaaaaatgaaagcaaratatcttatgtagaaatattttgataatatttttacagtgagctttcccatgtttttatgtcttaagtttctttgctgcgtttatgtaggttgcacaagaacttttactcacttgtaattgtgcctcagactttttgaaagtctaccttctaaattgccccgacgatctagattctacatgttaccattggtttattcttgtgctttctgtatttaaaactttggctgtactaagcaaatgcaaggttataatttagctaatagtagtttacagacaattctgatgattatgatttcatttggtttaactaagctgtactagttcatttcataaggaaatgatactgtagacaaatgtaaataaagcctgtgagtcaagcatcaagtggtgtttgttagaaataaactagagatttttaaaaaaaaaaaaaaaaaaaaaaaaaaaaaaaaaaaaaacccccggggggggccc

SEQ ID NO: 287 - DNA, 506 bp, Homo sapiens
  misc_feature (394): n equals a,t,g, or c
  misc_feature (470): n equals a,t,g, or c
  misc_feature (481): n equals a,t,g, or c
  misc_feature (494): n equals a,t,g, or c
acaagtagctgcagtacggtacggaattacagggtagacccaagcgtacgtaaaatttaaaaacaaaggactatttaaaaatacagtttattaacaaacgtgaactactttctgttacattaggtgttccctagtgtttcttaatttctttttagaaagtgtatttttattagtatttttccggtgaacagaagatttgtttggatttaaacatttactaagacagtacctattaggaaaaccaaatattgcaaatggtcaattcgattttaatttctcaaaagatactctgttatccagaagattaaaatgcctacattgagtgcttaaaaaaaaaaaaacmactgtgatratktgagcagaatggccagtaagttaagcctttttggatccnggtaatccagggtatccatttaccatggaaaggggattccccaaactactggcccagagggaagtttggttttttnaaatttaaggnggggaaattttanccctataaaatt

SEQ ID NO: 288 - DNA, 948 bp, Homo sapiens
  misc_feature (3): n equals a,t,g, or c
  misc_feature (926): n equals a,t,g, or c
ttnggccgagcttgggtcatggcggcgccgggcgcgctgctggtgatgggcgtgagcggctcggggaaatccaccgtgggcgccctgctggcatctgagctgggatggaaattctatgatgctgatgattatcacccggaggaaaatcgaaggaagatgggaaaaggcataccgctcaatgaccaggaccggattccatggctctgtaacttgcatgacattttactaagagatgtagcctcgggacagcgtgtggttctagcctgttcagccctgaagaaaacgtacagagacatattaacacaaggaaaagatggtgtagctctgaagtgtgaggagtcgggaaaggaagcaaagcaggctgagatgcagctcctggtggtccatctgagcgggtcgtttgaggtcatctctggacgcttactcaaaagagagggacattttatgccccctgaattattgcagtcccagtttgagactctggagcccccagcagctccagaaaactttatccaaataagtgtggacaaaaatgtttcagagataattgctacaattatggaaaccctaaaaatgaaatgacaatgattttgtatcagtggtccaaacagaactaagcataaatcattgtgccatcccaaacctcgttccagccgccttgcccatactagattctaaatgtttctaaaggcaaaccccaatgtgtcaagacagacttgtttaggtgtaattttaggaattatgctggttcatcaggaagcagagggggagttttaaaagtcaagcttaaattgaagtttaaattcatctataaccaaatcaaatgatcagaggaaattctgtaatcaatgctggaaatcgttacattgtttagaacattcttgctcatgcctgtatttgcacaaataaatgaaacttcgctgtcnaaaaaaaaaaaaaaaaaaaaaa

SEQ ID NO: 289 - DNA, 1034 bp, Homo sapiens
  misc_feature (376): n equals a,t,g, or c
ggcacgagctcgtgccggtttgacctggagcatgggtcctggaccaaattgccccgcagcctgcgcatgagggataagagggcagactttgtggttgggtcccttgggggccacattgtggccattgggggccttggaaaccagccatgtcctttgggctctgtggagagctttagccttgcacggcggcgctgggaggcattgcctgccatgcccactgcccgctgctcctgctctagtctgcaggctgggccccggctgtttgttattgggggtgtggcccagggccccagtcaagccgtggaggcactgtgtctgcgtgatggggtctgaaggcttggtgggagctgtccactggagcagctcattgccagangmrgctatttctatggctccttttgctgctgaggacactcactgtggctctgtgggatgagagaggcatgggggtgagcacttgaaacactgccttggggccttgggttaggggagcctttgtctttagtgcaggacacacatatgcttacacctacctttatcaccattcgttcatgaatcatgcctagctccatccttgccctgggacctactaggccttccatccaactgggaaatggggagaagcaaagctggcctcatgctcttcagggtcagttcctatctggagttgaccaggcctaccccagttgccattcctgaaaaatctcagctgccaggctgcctttagggtccctgtagacccaggagagttgagagggtgggggacacagagagaatagagaggatgtgggaactgccagagggccggagcgcaggagttcaagtggaggaatgctggctttgagccctctacactgctggttgtatgaccttggacaagtcacttcacctctctgtgcctcagcatcctcatctataaatggggatctctgaaaccttcctaccctacctacctcacagggctgttgtgaggacccagggagtttggatgtggaagtaaaagtgctgctaaaacctaaaaaaaaaaaaaaaaa

SEQ ID NO: 290 - DNA, 3091 bp, Homo sapiens
  misc_feature (24): n equals a,t,g, or c
cccagtagctcgtgccgctcgtgnccgccaactctcagtttgatcttaaagtctgaataataaaacaaatcccagcagtaatacatttcttaaacctcacagtgcatgatatatcttttcattctgatcctgtgtttgcaaaaatatacacatgtatatcatagttcctcactttttattcatttgttttcctattacctgtagtaaatatattagttagtacatggaatttatagcatcagctacccccaggaacagcacctgacaggcgggggattttttttcaagttgttctacatttgcataaattatttctattattattcatgtatgttatttatttctgaatcacactagtcctgtgaaagtacaactgcaaggcagaaagtgttaggattttgcatctaatgttcattatcatggtattgatggacctaagaaaataaaaattagactaagcccccaaataagctgcatgcatttgtaacaygattagtagatttgaatatatagatgtagtattttgggtatctaggtgttttatcattatgtaaaggaattaaagtaaaggactttgtagttgtttttattaaatatgcatatagtagagtgcaaaaatatagcaaaaataaaaactaaaggtagaaaagcattttagatatgccttaatttagaaactgtgccaggtggccctcggaatagatgccaggcagagaccagtgcctgggtggtgcctcctcttgtctgccctcatgaagaagcttccctcacgtgatgtagtgccctcgtaggtgtcatgtggagtagtgggaacaggcagtactgttgagaggagagcagtgtgagagtttttctgtagaagcagaactgtcagcttgtgccttgaggcttccagaacgtgtcagatggagaagtccaagtttccatgcttcaggcaacttagctgtgtacagaagcaatccagtgtggtaataaaaagcaaggattgcctgtataatttattataaaataaaagggattttaacaaccaacaattcccaacacctcaaaagcttgttgcattttttggtatttgaggtttttatctgaaggttaaagggcaagtgtttggtatagaagagcagtatgtgttaagaaaagaaaaatattggttcgcgtagagtgcaaattagaactagaaagttttatacgattatcattttgagatgtgttaaagtaggttttcactgtaaaatgtattagtgtttctgcattgccatagggcctggttaaaactttctcttaggtttcaggaagactgtcacatacagtaagcttttttccttctgacttataatagaaaatgttttgaaagtaaaaaaaaaaaaatctaatttggaaatttgacttgttagtttctgtgtttgaaatcatggttctagaaatgtagaaattgtgtatatcagatactcatctaggctgtgtgaaccagcccaagatgaccaacatccccacacctctacatctctgtcccctgtatctcttcctttctaccactaaagtgttccctgctaccatcctggcttgtccacatggtgctctccatcttcctccacatcatggaccacaggtgtgcctgtctaggcctggccaccactcccaacttgacctagccacattcatctagagatggttcctgatgctgggcacagactgtgctcatggcacccattagaaatgcctctagcatctttgtatgcatcttgatttttaaaccaagtcattgtacagagcattcagttttggctgtggtaccaagagaaaaactaatcaagaatataaaccacattccaggctgctgttttctctccatctacaggccacacttttactgtatttcttcatacttgaaattcattctgctattttcatatcagggtacagacttataagggtgcatgttccttaaaggtgcataattattcttattccgtttgcttatattgctacagaatgctctgttttggtgctttgagttctgcagacccaagaagcagtgtggaaattcactgcctgggacacagtcttataagaatgttggcaggtgactttgtatcagatgttgcttctcttttctctgtacacagattgagagttaccacagtggcctgtcgggtccaccctgtgggtgcagcacagctctctgaaagcaagaaccttcctacctattctaacgtttttgccctctaagaaaaatggcctcaggtatggtatagacatagcaagaggggaagggctgtctcactctagcaaccatccctccattacacacagaaagccctcttgaagcaaaagaagaagaaagaaagaaagcttatctctaaggctactgtcttcagaatgctctgagctgaatgctcttgctcctttcccaagaggcagatgaaaatatagccagtttatctatacccttcctatctgaggaggagaatagaaaagtagggtaaatatgtaacgtaaaatatgtcattcaaggaccaccaaaactttaagtaccctatcattaaaaatctggttttaaaagtagctcaagtaagggatgctttgtgacccagggtttctgaagtcagatagccattcttacctgccccttactctgacttattgggaaagggagaactgcagtggtgtttctgttgcagtggcaaaggtaacatgtcagaaaattcagagggttgcataccaataatcctttggaaactggatgtcttactgggtgctagaatgaaaatgtaggtatttattgtcagatgatgaagttcattgtttttttcaaaattggtgttgaaatatcactgtccaatgtgttcacttatgtgaaagctaaattgaatgaggcaaaaagagcaaatagtttgtatatttgtaataccttttgtatttcttacaataaaaatattggtagcaaataaaaataataaaaacaataactttaaactgctttctggagatgaattactctcctggctattttcttttttactttaatgtaaaatgagtataactgtagtgagtaaaattcattaaattccaagttttagcaaaaaaaaaa

SEQ ID NO: 291 - DNA, 518 bp, Homo sapiens
aggcatgaagaagagtgtgggtactgtttcctccacagcggccagagtcagggtggggagtgagtccagttgagggggaaacagtaccagcactgcggggcatgaagaagagtgtggggctgccggtggccgtgcagtgtgtggctctgccctggcaagaagagttgtgtctgcggttcatgcgggaggtggagcgactgatgacccctgaaaagcagtcatcctgatggctctggctccagaggacctgagactcacactctctgcagcccagcctagtcagggcacagctgccctgctgccacagcaaggaaatgtcctgcatggggcagaggcttccgtgtcctctcccccaaccccctgcaagaagcgccgactccctgagtctggacctccatccctgctctggtcccctctcttcgtcctgatccctccacccccatgtggcagcccatgggtatgacatagccaaggcccaactaacagtcaagaaacaaaaaaaaaaaaaaaaaaaattc

SEQ ID NO: 292 - DNA, 498 bp, Homo sapiens
  misc_feature (447): n equals a,t,g, or c
  misc_feature (468): n equals a,t,g, or c
  misc_feature (475): n equals a,t,g, or c
  misc_feature (479): n equals a,t,g, or c
  misc_feature (482): n equals a,t,g, or c
  misc_feature (489): n equals a,t,g, or c
ctcgtgccgaattcggcacgagcaacgtcgctccagctgctcttgacgactccacagataccccgaagccatggcaagcaagggcttgcaggacctgaagcaacaggtggaggggaccgcccaggaagccgtgtcagcggccggagcggcagctcagcaagtggtggaccaggccacagaggcggggcagaaagccatggaccagctggccaagaccacccaggaaaccatcgacaagactgctaaccaggcctctgacaccttctctgggatcgggaaaaaattcggcctcctgaaatgacagcagggagacttgggtcggcctcctgaaatgayagcagggagacttgggtgaccccccttccaggcgccatctagcacagcctggccctgatctccgggcagccaccacctcctcggtctgccccctcattaaaattcacgttnccaaaaaaaaaaaraaagggnggccgcntagnggntccaagnttagttacg

SEQ ID NO: 293 - DNA, 469 bp, Homo sapiens
ggccagccctggggcgccttaaaaaccggagctggcgcttggcakcgccactctgggcaggatccaacgtcgctccagctgctcttgacgactccacagataccccgaagccatggcaagcaagggcttgcaggacctgaagcaacaggtggaggggaccgcccaggaagccgccatggaccagctggccaagaccacccaggaaaccatcgacaagactgctaaccaggcctctgacaccttctctgggatygggaaaaaattcggcctcctgaaatgacagcagggagacttgggtcggcctcctgaaatgayagcagggagacttgggtgaccccccttccaggcgccatctagcacagcctggccctgatctccgggcagccaccacctcctcggtctgccccctcattaaaattcacgttcccaaaaaaaaaaaaaaaaaaaaagggggggcccggtccccatt

SEQ ID NO: 294 - DNA, 668 bp, Homo sapiens
  misc_feature (568): n equals a,t,g, or c
  misc_feature (650): n equals a,t,g, or c
  misc_feature (652): n equals a,t,g, or c
  misc_feature (658): n equals a,t,g, or c
gcacagaagggggaggccaaagtgggtgggagcgcgtgctgttgggagttgcttggaggttggcggcgcggggctgaaggctagcaaaccgagcgatcatgtcgcacaaacaaatttactattcggacaaatacgacgacgaggagtttgagtatcgacatgtcatgctgcccaaggacatagccaagctggtccctaaaacccatctgatgtctgaatctgaatggaggaatcttggcgttcagcagagtcagggatgggtccattatatgatccatgaaccagaacctcacatcttgctgttccggcgcccactacccaagaaaccaaagaaatgaagctggcaagctacttttcagcctcaagctttacacagctgtccttacttcctaacatctttctgataacattattatgttgccttcttgtttctcactttgatatttaaaagatgttcaatacactgtttgaatgtgctggtaactgctttgcttcttgagtagagccaccaccaccatagcccagccagatgagtgctctgtggaccacagcctaagctgagtgtgancccagaagccacgatgtgctctgtatccagacacacttggcagatggaggaagcatctgattgagacatggtgtacaggtcngnaatgcngtttgttttc

SEQ ID NO: 295 - DNA, 1400 bp, Homo sapiens
gctttgtcctccagtggctggtaggcagtggctgggaggcagcggcccaattagtgtcgtgcggcccgtggcgaggcgaggtccggggagcgagcgagcaagcaaggcgggaggggtggccggagctgcggcggctggcacaggaggaggagcccgggcgggcgaggggcggccggagagcgccagggcctgagctgccggagcggcgcctgtgagtgagtgcagaaagcaggcgcccgcgcgctagccgtggcaggagcagcccgcacgccgcgctctctccctgggcgacctgcagtttgcaatatgactttggaggaattctcggctggagagcagaagaccgaaaggatggataaggtgggggatgccctggaggaagtgctcagcaaagccctgagtcagcgcacgatcactgtcggggtgtacgaagcggccaagctgctcaacgtcgaccccgataacgtggtgttgtgcctgytggcggcggacgaggacgacgacagagatgtggctctgcagatccacttcaccctgatccaggcgttttgctgcgagaacgacatcaacatcctgcgcgtcacaacccgggccggctggcggastcctgctcttggagaccgacgctggccccgcggcgagcgagggcgccgagcagcccccggacctgcactgcgtgtggtgacgaatccacattcatctcaatggaaggatcctgccttaagtcaacttatttgtttttgccgggaaagtcgctacatggatcaatgggttccagtgattaatctccctgaacggtgatggcatctgaatgaaaataactgaaccaaattgcactgaagtttttgaaatacctttgtagttactcaagcagttactccctacactgatgcaaggattacagaaactgatgccaaggggctgagtgagttcaactacatgttctgggggcccggagatagatgactttgcagatggaaagaggtgaaaatgaagaaggaagctgtgttgaaacagaaaaataagtcaaaaggaacaaaaattacaaagaaccatgcaggaaggaaaactatgtattaatttagaatggttgagttacattaaaataaaccaaatatgttaaagtttaagtgtgcagccatagtttgggtatttttggtttatatgccctcaagtaaaagaaaagccgaaagggttaatcatatttgaaaaccatattttattgtattttgatgagatattaaattctcaaagttttattataaattctactaagttattttatgacatgaaaagttatttatgctataaattttttgaaacacaatacctacaataaactggtatgaataattgcatcaaaaaaaaaaaaggggggccgctcgcgatctagaaactag

SEQ ID NO: 296 - DNA, 960 bp, Homo sapiens
  misc_feature (599): n equals a,t,g, or c
  misc_feature (859): n equals a,t,g, or c
  misc_feature (933): n equals a,t,g, or c
  misc_feature (950): n equals a,t,g, or c
  misc_feature (951): n equals a,t,g, or c
  misc_feature (959): n equals a,t,g, or c
gtcagcccgagcccgtgcrggccctttaagggccgggggcgtgtagcgggcccgccccctccccgcggcgcccgcagtccgttaagtgcgagccccggcgcaggggccggatctggccgggggccggcggcggtgtgggagcggcgcgtcatgtacaccatcaccaaggggcccagcaagctggtcgcgcagcgccgcacaggtcccacgcagcagcaggtggagggccggctcggcgagctcctgaaatgccggcagcccgcgccgccgacctcgcagcccccgcgggcgcagccytttgcgcascgccgggaccctggcccctgtcgagtccagggccaaggcttgtgttcaatcgtgtgaatggccggcgggccccctccacgtccccatccttcgaggggacccaggagacctacacagtggcccacgaggagaatgtccgctttgtgtccgaagcctggcagcaggtgcaacagcagctggatggtggcccagccggtgagggcgggccaaggcctgtgcagtacgtggagaggacccccaatccccggctgcagaactttgtgcccattgacctagacgagtggtgggcgcancagttcctggcgagaatcaccagctgttcctagtggctgctgggagggggcgctgctacacggccgacctgtcgccaggagagaagcatggcgccctgcccacccactgcgcctggctgggtgccggccacacctgaagtgccagcatttggacttttgcacctttttttcccttggcccggctgtcccaaccaagctgccatgccaagggccgaacccgtctgacctcagccctgctcactgtgcccagggaccagcgnacacccctggggctggcagggaggagctccaggctaataaagtggagaaactgtcaaaaaaaaaaaaaaaaaanctcgagggggggcccgnncccaattnc

SEQ ID NO: 297 - DNA, 657 bp, Homo sapiens
  misc_feature (29): n equals a,t,g, or c
  misc_feature (86): n equals a,t,g, or c
  misc_feature (88): n equals a,t,g, or c
caaaagctggagctccaccgcggtgacgnccgctctagaactagtggatcccccgggctgcaggaattcggcacgagctcgtgccngncctttggagcagagaggaggcaatggccaccatggagaacaaggtgatctgcgccctggtcctggtgtccatgctggccctcggcaccctggccgaggcccagacagagacgtgtacagtggccccccgtgaaagacagaattgtggttttcctggtgtcacgccctcccagtgtgcaaataagggctgctgtttcgacgacaccgttcgtggggtcccctggtgcttctatcctaataccatcgacgtccctccagaagaggagtgtgaattttagacacttctgcagggatctgcctgcatcctgacgcggtgccgtccccagcacggtgattagtcccagagctcggctgccacctccaccggacacctcagacacgcttctgcagctgtgcctcggctcacaacacagattgactgctctgactttgactactcaaaattggcctaaaaattaaaagagatcgatattaaaaaaaaaagaaaaggaaaaaaaagggcggccgtctaagaggatccaagcttacgtaacgcgtgcatgcgaaggtcatagctcttctatagtgtca

SEQ ID NO: 298 - DNA, 892 bp, Homo sapiens
gcagccaggctctcagggaaggtccatgctgcttggcctgagttcaaggctttctgcctgtagcctggactcccgtggacccccgtgggcaggtggcttccccgtggcatctccacaccgcctctgcctgcccctgtggactgatgctatcgcgcaccgtcccacgaccccaccccgagctcctgaagccggggtctgagcctgcatcacctctggcctctcatcccccactctcctgagagcagtggtcacagcggccggccgctctgctgagaaggcagagaggcaggctcaggcctcagcgtggacagcagggataaggggcacgaaggacggggactcggccccttcagaattcctcaggactctcaggtgcagctttgccaaaaaggaacttttcatgtcatgcagttgaggggacttagtctcaatcccaggctcctcttgactctgggcagctttaatcaggttgggcagcctctgctacagcgtggagtgggatggctctcttccctcagccacgccgcttgtgaggacagaggtgggggagtgggaagtgggaagtcaccagagaacaggagagggatttgagggcgcgaccccagcgctctccacggaccagccagagggactggagccaggtgtgcatgggttcaaggccctggccctgcccagcctctgtcttgggagctcagccccagggttcggtcgtcagcagtttcccaagaacaagatgtgatggcatctgctgctgaaaccctgatgaggaccaggccccctgcaccgctgtcagcctgaggaattaaagctttggtgctgggaaragcaaaaaaaaaaaaaaaaaaaaaaaaaaaaaaaaaaaaaaaaaaaaaaaaaaaaaaaaaaaaaactc

SEQ ID NO: 299 - DNA, 1624 bp, Homo sapiens
  misc_feature (1621): n equals a,t,g, or c
  misc_feature (1623): n equals a,t,g, or c
  misc_feature (1624): n equals a,t,g, or c
cccgggctgcaggaattcggcacgagagaggaggtcccacaggctcctgccctggrctaccgagtcccccgatggtgttatacattaaatatccaggatggagaagccacatgctactcaccgaaggaggaaattatcacagcagcctgggcacgcgttgtgagctctcctgtgaccggggctttcgattgattggaaggaggtcggtgcaatgcctgccaagccgtcgttggtctggaactgcctactgcaggcagatgagatgccacgcactaccattcatcactagtggcacttacacctgcacaaatggagtgcttcttgactctcgctgtgactacagctgttccagtggctaccacctggaaggtgatcgcagccgaatctgcatggaagatgggagatggagtggaggcgagcctgtatgtgtagacatagatccccccaagatccgctgtccccactcacgtgagaagatggcagagccagagaaattgactgctcgagtatactgggacccaccgttggtgaaagattctgctgatggtaccatcaccagggtgacacttcggggccctgagcctggctctcactttcccgaaggagagcatgtgattcgttacactgcctatgaccgagcctacaaccgggccagctgcaagttcattgtgaaagtacaagtgagacgctgcccaactctgaaacctccgcagcacggctacctcacctgcacctcagcgggggacaactatggtgccacctgtgaataccactgtgatggcggttatgatcgccaggggacaccctcccgggtctgtcagtccagccgccagtggtcaggttcaccaccaatctgtgctcctatgaagattaacgtcaacgtcaactcagctgctggtctcttggatcaattctatgagaaacagcgactcctcatcatctcagctcctgatccttccaaccgatattataaaatgcagatctctatgctacagcaatccacctgtggactggatttgcggcatgtgaccatcattgaactggtgggacagccacctcaggaggtggggcgcatccgggagcaacagctgtcagccaacatcatcgaggagctcaggcaatttcagcgcctcactcgctcctacttcaacatggtgttgattgacaagcagggtattgaccgagaccgctacatggaacctgtcacccccgaggaaatcttcacattcattgatgactacctactgagcaatcaggagttgacccagcgtcgggagcaaagggacatatgcgagtgaacttgagccagggcatggttaaagtcaagggaaaagctcctctagttagctgaaactgggacctaataaaaggaggaaatgttttcccacagttctagggacaggactctgaggtgggtgagtttgacaaatcctgcagtgtttccaggcatccttttaggactgtgtaatagtttccctagaagctaggtagggactgaggacaggccttgggcagtgggttgggggtagaagttcttcctttcctaacccgggcccctgcccagctctccaaagtctttcagaaaagtaaatcctaaattcagtgatgaaaaaaaaaaaanann

SEQ ID NO: 300 - DNA, 1969 bp, Homo sapiens
  misc_feature (13): n equals a,t,g, or c
ttaatttaggtgnacactatagaagggtacgcctgcaggttaccggatccggaattcccgggatccggagccgcccgaagccggtgccgcagccccctgcgcccccggtgcccccgacatgtccttccgcaaagtggtccggcagagcaaattccggcatgtgttcgggcagccggtcaagaacgaccagtgctatgaggacattcgcgtgtcccgtgttacctgggacagcaccttctgcgccgtcaaccccaagttcctggcggtgattgtggaggccagtggagggggtgcctttctggtgctccccctaagcaagacgggccgcattgacaaggcctacccgacggtgtgtgggcacacgggacctgtcctggacatcgactggtgtcctcacaacgacgaatcatagccagcggytcggaggactgcacggtcatggtgtggcagatcccagagaacgggctgacctccccgctgacagagccggtggtggtactggaggggcacaccaagcgagtgggcatcatcgcctggcaccccacggcccgaaacgtgctgctcagtgcaggctgcgacaacgtggtactcatctggaatgtgggcacagcggaggagctgtaccgcctggacagcctgcaccctgacctcatctacaatgtcagctggaaccacaatggcagcctgttttgctcagcatgcaaggacaagagcgtgcgcatcatcgacccccgtcggggcaccctggtggcagagcgggagaaggctcatgagggggcccggcccatgcgggccatcttcctggcagatggcaaggtgttcaccacaggcttcagccgaatgagcgagcggcagctggcgctctgggacccagaaaacctcgaggaacccatggccctgcaggaactggactcgagcaacggggccctgctgcccttctacgaccccgacaccagtgtggtctacgtctgcggcaagggtgactccagcatccggtactttgagatcacagaggagcctccctacatccacttcctgaacacgttcaccagcaaggagccgcagcggggtatgggcagcatgcccaagcggggcctggaggtcagcaagtgcgagatcgcccggttctacaaactgcatgagcgcaagtgtgagcccatcgtcatgactgtgccaagaaagtcggacctcttccaggatgatctgtaccccgacacagccgggcccgaggcagccctggaggctgaggagtgggtgagcgggcgggatgccgacccgatcctcatctcactgcgggaggcctacgtgcccagcaagcagcgggacctgaagatcagccggcgcaacgtgttgtctgacagccggcccgccatggccccgggctcctcccacctaggggcccccgcctccaccaccactgctgctgatgccacccccagcggcagcctggccagagccggggaggctgggaagctggaggaggtgatgcaggagctgcgggccctgagggcgctggtcaaggagcagggcgaccgcatctgccgcctggaggagcagctgggccgcatggagaacggggatgcgtagggccacagccacacgccaccttcatctcctccgccgcccccttcccactcagcttctgccagcgggtcgcaccgggctagctggctgcccagagcctctgaggcagcgcaggggtcagttcccacccccacccgtcccaggcccaggccgaagccagcgcccagctttcctcactgttcctgtggaggatgtctacgcccaggcgagctcctcgacctctgagggaccatctccccgaccactgcccagccctctgctccctccccagaggaggcgggagggtgggctctatattttcattccaaataaaattctctttctaaaaaaaaaaaaaaaaaaaaaaaaaaaaaaaaaaaaaaaaaaaaaaaacggacgtcgtggg

SEQ ID NO: 301 - DNA, 1882 bp, Homo sapiens
  misc_feature (22): n equals a,t,g, or c
  misc_feature (223): n equals a,t,g, or c
  misc_feature (1840): n equals a,t,g, or c
  misc_feature (1849): n equals a,t,g, or c
ggagctctcggcctcggctttngacgacggcaacttctcgctgctcatccgcgcggtggaggagacggacgcggggctgtacacctgcaacctgcaccatcactactgccacctctacgagagcctggccgtccgcctggaggtcaccgacggccccccggcacccccgcctactgggacggcgagaaggaggtgctggcggtggcgcgcggcacccgctytnctgacctgcgtgaaccgcgggcacgtgtggaccgaccggcacgtggaggaggctcaacaggtggtgcactgggaccggcagccgcccggggtcccgcacgaccgcgcggaccgcctgctggacctctacgcgtcggcgagcgccgcgctacgggcccctttttctgccgamcgcgtggctgtgggcgcggatgcctttaagcgcggtgacttctcactgcgtatcgagccgctggaggtcgccgacgagggcacctactcctgccacctgcaccaccattactggcgcgcggccacaacgtcatcaatgtcatcgtccccgagagccgagcccacttcttccagcagctgggctacgtgctggccacgctgctgctcttcatcctgctactggtcactgtcctcctggccgcccgcaggccgcggaggctacgaatactcggaccagaagtcgggaaagtcaaaggggaaggatgttaacttggcggagttcgctgtggctgcaggggaccagatgctttacaggagtgaggacatccagctagattacaaaaacaacatcctgaaggagagggcggagctggcccacagccccctgcctgccaagtacatcgacctagacaaagggttccggaaggagaactgcaaatagggaggccctgggctcctggctgggccagcagctgcacctctcctgtctgtgctcctcggggcatctcctgatgctccggggctcaccccccttccagcggctggtcccgctttcctggaatttggcctgggcgtatgcagaggccgcctccacacccctcccccaggggcttggtggcagcatagcccccacccctgcggcctttgctcacgggtggccctgcccacccctggcacaaccaaaatcccactgatgcccatcatgccctcagacccttctgggctctgccgctgggggcctgaagacattcctggaggacactcccatcagaacctggcagccccaaaactggggtcagcctcagggcaggagtcccactcctccagggctctgctcgtccggggctgggagatgttcctggaggaggacactcccatcagaacttggcagccttgaagttggggtcagcctcggcaggagtcccactcctcctggggtgctgcctgccaccaagagctcccccacctgtaccaccatgtgggactccaggcaccatctgttctccccagggacctgctgacttgaatgccagcccttgctcctctgtgttgctttgggccacctggggctgcaccccctgccctttctctgccccatccctaccctagccttgctctcagccaccttgatagtcactgggctccctgtgacttctgaccctgacacccctcccttggactctgcctgggctggagtctagggctggggctacatttggcttctgtactggctgaggacaggggagggagtgaagttggtttggggtggcctgtgttgccactctcagcaccccacatttgcatctgctggtggacctgccaccatcacaataaagtccccatctgatttttaaaaaaaaaaaaaaaaaaaaaaaaaaaaaaaaaaaaaaaaaaaaaaaaaaaaaanacaaaaaanaaaaaaaaatgggaataaaaataacaaaaaaat

SEQ ID NO: 302 - DNA, 2804 bp, Homo sapiens
gattccaacgcatcccagtccctgtgtgacatcatccgcctgagccgggagcagatgatccaagtccaggacagcccagagcctgaccaactgctggccaccctggagaagcaggagacgattgagcagctcttaagcaacatgttcgagggggagcagagccagtctgtcatcgtcagtgggatccaggtgctgctgacmctgctggagcccaggaggccgaggtccgagtccgtgaccgtgaacagcttcttcagcagtgtggatgggcagctggagctcctggcccagggggcctggaaagcactgtgtccagtgtgggcgccttgcacgccctacgcccgcggctcagctgcttccaccagctcctgctggagcctcccaagctggagccgctacagatgacatggggcatgctggctccgctctgggcaacacgcggctgcacgtggtcaagctcctggccagtgccctgagcgccaatgatgcagycctgacgcacgagctcctggcactggacgtgcccaacaccatgctggacctcttcttccattatgtcttcaacaacttcttgcatgcccaagtagagggatgcgtgagcaccatgctgagcttggggccacytcctgacagcagccctgagacgcccatccaaaaccctgttgtgaaacatctgctgcagcatgccgcctggtggagcggatcctgacgtcctgggaggagaacgaccgtgtacagtgtgcgggaggccctcggaaaggctacatgggtcacctgacaagagtggccgktgccctggtgcagaacacggagaaggggcccaatgcagagcagctgcggcagctgctgaaggagctgcccagcgagcagcaggagcagtgggaagccttcgtatcggggcccctggcggagaccaacaagaagaacatggtggacctggtgaacacccaccacctacactcctccagtgacgatgaggacgaccggctcaaggagttcaacttccctgaggaggctgtgctgcagcaggccttcatggacttccagatgcagcgcatgacctctgccttcattgaccacttcggcttcaatgatgaggagtttggggagcaggaggagagtgtgaacgcaccttttgacaagacagccaacatcaccttctccctcaatgctgacgatgagaaccccaacgccaacctacttgagatatgctacaaggaccgcatccagcagtttgatgatgatgaggaagaggaggacgaggaagaggcccagggctcaggggagtctgatggagaagatggcgcctggcagggcagccagctggccaggggggcccgtctgggccagccacctggtgtccggagtggaggcagcacagacagtgaggacgaagaagaggaggacgaggaggaggaggaagacgaggagggcattggctgtgcagcccgtggaggggccacccctctgtcctaccccagccctggccctcagcctccaggccccagctggacagccacctttgacccagtgcctacagatgccccgaccagcccccgagtctccggggaggaagagctgcacactgggcctccagccccacaggggcccctcagtgtgccccagggcctccccactcagagcctggccagccctcctgcccgtgacgccctgcagctcaggtctcaggaccccacacccccctcagcacctcaggaagccacagaaggcagcaaagtcacggagccctcagccccttgccaggccttggttagcatcggggaccttcaggccaccttccacgggatccgttctgcccccagctcctcggacagtgcaaccagagacccctctacctctgtcccagcctccggggcccaccagcccccccagaccacagaaggggagaagagcccagagcccttggggcttccccaaagccagagtgcccaggccctcacgcctcctccgatacccaatggctctgccccggaagggcctgcatccccaggctcccaatagctgcctggtgcggcasggcggccaaatcttccgtcctcccgtggatctcccggggtgggggcagggcgggtcccacgatggcccccattgccctcatcaccctgacacccccacattctctcctctggacccccaggaggctggtgccagggagacaggcccaacccacccccatttgcactgagaagagaagttttggagcgttgcctcctagaataaagatacagagagtcaaatagagagaatggagagagagaaacatatattatatattatatagagagagggaggagagcgagagagagtgaggacaccgaactgggctggcggctccaaagcacagccttccctgttccgtcccagcgggagctggtgttaggggtcccaaggttgccacccacgtgcccagctgtcccacgctgcagcgcagacggccacgcccacacccggccttttagctcaggtccaccatgggggacggcccagcgtgggtgggggtgccagagggtcccgagtgggggccgtgcctttgcccagaccctgcactttcaaccaggccagtccggctctggggagcaggggcctccccggcaacagccccaggggccttgagggtctgaggtcccagccctgttgccaagtgaccttgtccccagctccctcctcccaggctggtgtgagtgtgcgtgcgtttgtgccgagcttctatttcatattgcaaatataaataaaggaaggcagtttacgaaaaaaaaaaaaaaaaaaaaaaaaaaaaaaaaacc

SEQ ID NO: 303 - DNA, 3859 bp, Homo sapiens
  misc_feature (581): n equals a,t,g, or c
  misc_feature (889): n equals a,t,g, or c
  misc_feature (890): n equals a,t,g, or c
aagactgcatagggctcgccgtggggktcttcaggtgatggcagaggagccaggcacaacagggaagtaagaggaaagcatatgtggaggcatggaaggatggaagaaacagcctggagatcctgggaaactgctaccagttcagagaggggtgtggggggttggtggcactatgtggcgcgtctgtgcgcgacgggctcagaatgtagccccatgggcgggactcgaggctcggtggacggccttgcaggaggtacccggaactccacgagtgacctcgcgatctggcccggctcccgctcgtcgcaacagcgtgactacagggtatggcggggtccgggcactgtgcggctggacccccagttctggggccacgccgcggaaccgcttactgctgcagcttttggggtcgcccggccgccgctattacagtcttcccccgcatcagaaggttccattgccttctctttcccccacaatgcaggcaggcamcatagcccgttgggaaaaaaaagagggggacaaaatcaatgaaggtgacctaattgcagaggttgaaactgataaagccactgttggantttgagagcctggaagagtgttatatggcaaagatacttgttgctgaaggtaccagggatgttcccatcggagcgatcatctgtatcacagttggcaagcctgaggatattgaggcctttaaaaattatacactggattcctcagcagcacctaccccacaagcggccccagcaccaacccctgctgccactgcttcgccacctacaccttctgctcaggctcctggtagctcatatccccctcacatgcaggtacttcttcctgccctctctcccaccatgaccatgggcacagttcagagatgggnnaaaaaagtgggtgagaagctaagtgaaggrgacttactggcagagatagaaactgacaaagccactataggttttgaagtacaggaagaaggttatctggcaaaaatcctggtccctgaaggcacaagagatgtccctctaggaaccccactctgtatcattgtagaaaaagaggcagatatatcagcatttgctgactataggccaaccgaagtaacagatttaaaaccacaagygccaccacctaccccacccccggtggccgctgttcctccaactccccagcctttagctcctacaccttcagcaccctgcccagctactcctgctggaccaaagggaagggtgtttgttagccctcttgcaaagaagttggcagtagagaaagggattgatcttacacaagtaaaagggacaggaccagatggtagaatcaccaagaaggatatcgactcttttgtgcctagtaaagttgctcctgctccggcagctgttgtgcctcccacaggtcctggaatggcaccagttcctacaggtgtcttcacagatatcccaatcagcaacattcgtcgggttattgcacagcgattaatgcaatcaaagcaaaccatacctcattattacctttctatcratgtaaatatgggagaagttttgttggtacggaaagaacttaataagatattagaagggagaagcaaaatttctgtcaatgacttcatcataaaagcttcagctttggcatgtttaaaagttcccgaagcaaattcttcttggatggacacagttataagacaaaatcatgttgttgatgtcagtgttgcggtcagtactcctgcaggactcatcacacctattgtgtttaatgcacatataaaaggagtggaaaccattgctaatgatgttgtttctttagcaaccaaagcaagagagggtaaactacagccacatgaattccagggtggcacttttacgatctccaatttaggaatgtttggaattaagaatttctctgctattattaacccacctcaagcatgtattttggcaattggtgcttcagaggataaactggtccctgcagataatgaaaaagggtttgatgtggctagcatgatgtctgttacactcagttgtgatcaccgggtggtggatggagcagttggagcccagtggcttgctgagtttagaaagtaccttgaaaaacctatcactatgttgttgtaactaactcaagaatttctaaactctcccaggtcacactgattcattcttaacaagatatttatatgttattaaacaggtggttctttttattttaaccagttatttttattattgagtctgtccagataagttatttataatgggcattactgaatttttaaaatgccgattacacccaaatattgtgcacatttaataatcagacaccagatttttagctctgtactcctaattaagggacatgtatgtggccttgcctagccctttggtgataagtacttcctctaggaaatgtacgataggtagaattgtggttccctaaagacaagtacataaaggtgaccctgatgaaaccttgaagttctgaaatttaactgcctaaaatgttctccttagatgtgagagaaagagaaatcaggaaaattaattctcttgggggaagggcttgaattgaagctttactttagaatttagccctggtttgaaattttccattacatgatcttggtttatcatcgatgggaagggtagaaaacttcaaggaaaataagtgaaattttaaaagtcagcattttcttagacctcttcagctgattgtttatttttctatgaattcctacacatggttattcccccctacttgagataatctaaatataaaccagctacttgatgtaactgaraatttgtgtggatatttatttaaacaaatgtgtaattttgagtacagaattcaacagttacctccaaaaaagaaacattgttaatataatttaacagaagttgtgaaactaaaattttctaagattaactggtagttcattgtaaatgaacataatgaacagaatttatgactccactgtggaaaatgctatcaaataactaaggaatatatatggaataagtgtacatatgtaaaatattgttactagagttagatatgtgccaaagtccatttatcccaaatcctgtctgaaaaggaggggtacattggtaaacattttggagtgcttaaaaatgccaaaaacaaaatggtaatttctactttgataaagtaaaaaagttaaatgtgtgtaaaaaagtgttctgtgtccttctactccagcatcgtctcatgtaaaataagaaagccctaaaatactattggagagaaaaaattaactaggttgctactttatttgcctaaatacttttttctattttgttagattttgcctttcttttggaaggaaggaggcgatattctgsattataaaaatgaattgggaacattatcacaattccagactttctattaatatttatgtgttttaataaacgtttgaaattatttatgactacttaaaatgaatctgaccagtgcttccyggtatatgtaatatgtggagttagcccctgaaatttgctttaagtgtttcagtgttgaatctgtttctaaatattcattattacatggtacacaagtgacactccatatattccacacagacttttaccttgctgtattattatgaaaacaatacattaatttgatttttcagtaattagtaattttaggttgaagattatccaaaagaaacaagcttatcacaagggaccatcatcaatatgatccaaatctggttcaaacattcaaaacttcaaagataattcatctttcgctaatgcttgtggttctgttgttcccttgaaaaaaaataaaaacagttgccttctaataaacattgttgagttaaaaatta

SEQ ID NO: 304 - DNA, 3378 bp, Homo sapiens
  misc_feature (29): n equals a,t,g, or c
  misc_feature (1350): n equals a,t,g, or c
  misc_feature (3361): n equals a,t,g, or c
  misc_feature (3365): n equals a,t,g, or c
tagttctagatcgcgagcggccgacgagncggcgctgtgcctgcagtgcgatatgaacgactgctatagccgcctgcggaggctggtgcccaccatcccgcccaacaagaaagtcagcaaagtggagatcctgcagcacgttatcgactacatcctggacctgcagctggcgctggagacgcacccggccctgctgaggcagccaccaccgcccgcgccgccacaccacccggccgggacctgtccagccgcgccgccgcggaccccgctcactgcgctcaacaccgacccggccggcgcggtgaacaagcagggcgacagcattctgtgccgctgagccgcgctgtccaggtgtgcggtcgcctgagcccgagccaggagcactagagagggagggggaagagcagaagttagagaaaaaaagccaccggagaaaggaaaaaacatcggccaacctagaaacgttttcattcgtcattccaagagagagagaggaaagaaaaatacaactttcattctttctttgcacgttcataaacattctacatacgtattctcttttgtctcttcatttataactgctgtgaattgtacatttctgtgttttttggaggtgcagttaaacttttaagcttaagtgtgacaggactgataaatagaagatcaagagtagatccgactttagaagcctactttgtgaccaaggagctcaatttttgttttgaagctttactaatctaccagagcattgtagatattttttttttacatctattgtttaaaatagatgattataacggggcagagaactttcttttctctgcaagaatgttacatattgtatagataaatgagtgacatttcataccatgtatatatagagatgttctataagtgtgagaaagtatatgctttaatagatactgtaattataagatatttttaattaaatatttttttgtaaatattatgtgtgtgtttttttttaatctatgggaatatttcttttggaaaatcatttttcagctcaattacagagctcttgatatcttgaatgtcttttctgtttggcctggctcttaatttgcttttgttttgcccagtatagactcggaagtaacagttatagctagtggtcttgcatgattgcatgagatgtttaatcacaaattaaacttgttctgagtccattcaaatgtgtttttttaaatgtagattgaaatctttgtatttgaagcatacatgttgaaartacaccttatcagtttttaagtacagggttttatagtgtaatatatacagagtaagtgtttgtttttgtttttcaactgaggtcaaaatggattctgnaatgattttgcatatgggatgaggaaatgcttggatccttaaggagtttacgaaatctgctgttttatcaaagtgaaaaaaaattgcttattactcttcattttacactaaagcttaatgtcactaagtttcatgtctgtacagattatttaaatcatggaaatgaaaaaaatgttctctgcttgctaccaaaggacaaactcttggaaatgaacactttctgctttccttcctccaaagaattaataggcaacagtgggagaaaaaaaaggcataatggcaaatccttcaagcagggataaaagtcgatcttcaaacattaacttaagcagaccaaaaattctgatgaccgcatctagattatttttttataaaaatgattttcactatagctatgttacgctaagctactgtccaatctcttgtgatgtgtaacttttacatgtgaatattaaagtagatttctctgtcttgtactgtgatttctggtctcatttctttaaaaccttactcatttttcttttaaggctcttttttctccttaaggaaggtaatattttctaggttagataggactatcagggtttgtgaacattatgcatttaatgttatgggtactttacacacaagttagatggaatttttagagtgaaagaattaagtaggatttaattgggtgctttgtaaatagtcaactgtgtgtataacgtggtctgtttgatttttaaaaggaaaggatttgtttcagattatacaagaataaaagtattatagacccaagggacttcttatgaggtcaaattcagatatttatatgaatatgaaataccatggtccctagtagtcagttgaagtggcaatgtctaaacagaaatgaacaaaactaatgctagcaggttaaaatcaatcaaaatgtttaaaaattgattctgtcctcagcatgttayttcctcagctctgataatttactggtcttgagtattttgagaatttgatgttgaacgttataaagtcaaagaactgcttgtttagatgaggtttatttttatttttgatattattcattcttgtcacacatcaagaagaaaacactagagtgctgctggaattccaaatctgaagaattctaacgactgcattctttgttattaaaaagggcacaatccttcctttttatttggcagtttaatttcagtaggaagcatgtcacatgtgcactgttggttagaattatgcatctgtcatgcctgactgctgaaccctacctaagccttttggcgcagtttaaaacttatactggtggactgtgaacctcaaaacaaatgggtatttttgggttttgaggatagatgttactccttaaagtttgtatttggggcatgaaaaactactgaaagaagaaaagtgctacagatactacatttcaaagagttggcattttccctttggccactcaagcagcatttgatgtatctaaagaaacaaagtcattgtttattttttaaaaaattatatgcagttgtacaagatactacattccattgaaatgttggctatgtcctaaccaggcaaccagataacaaaaacattttgagtcttttatctaggtagttctaattattcagctacttagtttaacaaaggaaaatatcctgacttctctcatttcatttgtagacttttcattgtataggcacaaccaaagagtcagactggtttaaaactccagaaggaaaaaaagtatcccacacagtggatgttgtttctaagaatgctacaaaatcctgacatctcagacatctcaatgttaaaggaagaaaaaaaataccttttcatttcaaagaactaatatactttgatattgtgtaaaccttactcaagtttattgtcaagctttaactgcctttttagaactttttaaaatttcgagcccacaaatctattgtattagttgccttctataacaataaatcttcactgagcaaaaaaaaaaaaaaaaaaaaaaaaaaancccnggggggggggccc

SEQ ID NO: 305 - DNA, 1014 bp, Homo sapiens
cagcggcggcggcggcggcaggatgatcaagctgttctcgctgaagcagcagaagaaggaggaggagtcggcgggcggcaccaagggcagcagcaagaaggcgtcggcggcgcagctgcggatccagaaggacataaacgagctgaacctgcccaagacgtgtgatatcagcttctcagatccagacgacctcctcaacttcaagctggtcatctgtcctgatgagggcttctacaagagtgggaagtttgtgttcagttttaaggtgggccagggttacccgcatgatccccccaaggtgaagtgtgagacaatggtctatcaccccaacattgacctcgagggcaacgtctgcctcaacatcctcagagaggactggaagccagtccttacgataaactccataatttatggcctgcagtatctcttcttggagcccaaccccgaggacccactgaacaaggaggccgcagaggtcctgcagaacaaccggcggctgtttgagcagaacgtgcagcgctccatgcggggtggctacatcggctccacctactttgagcgctgcctgaaatagggttggcgcatacccacccccgccacggccacaagccctggcatcccctgcaaatatttattgggggccatgggtaggggtttggggggcggccggtgggggaatcccctgccttggccttgcctccccttcctgccacgtgcccctagttatttttttttttttaacaccatgtgattaaggtcggcgctgcctcccccgacccactcagcgatgggaaatgaattggcttgtctagcccccctgctgggtgcttgttcagcccccactctgggctgtggagtgggtgggcaacgggcctgggtagctgggcccaggcaacccacccctccacctctggaggtcccaccaggctattaaaggggaatgttactgcaaaaaaaaaaaaaaaaaaaaaaaaaaaaaaaaaaaaaaaaaaaaaaaaaaaaaaaaaaaaaaaa

SEQ ID NO: 306 - DNA, 2127 bp, Homo sapiens
ggaggaggcgccgagctgaccgggcgacgccgcgggaggttctggaaacgccsggagctgcgagtgtccagacacttccctctgtgaccatgaaactctgggtgtctgcattgctgatggcctggtttggtgtcctgagctgtgtgcaggccgaattcttcacctctattgggcacatgactgacctgatttatgcagagaaagagctggtgcagtctctgaaagagtacatccttgtggaggaagccaagctttccaagattaagagctgggccaacaaaatggaagccttgactagcaagtcagctgctgatgctgagggctacctggctcaccctgtgaatgcctacaaactggtgaagcggctaaacacagactggcctgcgctggaggaccttgtcctgcaggactcagctgcaggttttatcgccaacctctctgtgcagcggcagttcttccccactgatgaggacgagataggagctgccaaagccctgatgagacttcaggacacatacaggctggacccaggcacaatttccagaggggaacttccaggaaccaagtaccaggcaatgctgagtgtggatgactgctttgggatgggccgctcggcctacaatgaaggggactattatcatacggtgttgtggatggagcaggtgctaaagcagcttgatgccggggaggaggccaccacaaccaagtcacaggtgctggactacctcagctatgctgtcttscagttgggtgatctgcaccgtgccctggagctcacccgccgcctgctctcccttgacccaagccacgaacgagctggagggaatctgcggtactttgagcagttattggaggaagagagagaaaaaacgttaacaaatcagacagaagctgagctagcaaccccagaaggcatctatgagaggcctgtggactacctgcctgagagggatgtttacgagagcctctgtcgtggggagggtgtcaaactgacaccccgtagacagaagaggcttttctgtaggtaccaccatggcaacagggccccacagctgctcattgcccccttcaaagaggaggacgagtgggacagcccgcacatcgtcaggtactacgatgtcatgtctgatgaggaaatcgagaggatcaaggagatcgcaaaacctaaacttgcacgagccaccgttcgtgatcccaagacaggagtcctcactgtcgccagctaccgggtttccaaaagctcctggctasaggaagatgatgaccctgttgtggcccgagtaaatcgtcggatgcagcatatcacagggttaacagtaragactgcakaattgttacaggttgcaaattatggagtgggaggacagtatgaaccgcacttcgacttctctaggaatgatgagcgagatactttcaagcatttagggacggggaatcgtgtggctactttcttaaactacatgagtgatgtagaagctggtggtgccaccgtcttccctgatctgggggctgcaatttggcctaagaagggtacagctgtgttctggtacaacctcttgcggagcgggcgaaggtgactaccgaacaagacatgctgcctgccctgtgcttgtgggctgcaagtgggtctccaataagtggttccatgaacgaggacaggagttcttgagaccttgtggatcaacagaagttgactgacatccttttctgtccttccccttcctggtccttcagcccatgtcaacgtgacagacacctttgtatgttcctttgtatgttcctatcaggctgatttttggagaaatgaatgtttgtctggagcagagggagaccatactagggcgactcctgtgtgactgaagtcccagcccttccattcagcctgtgccatccctggccccaaggctaggatcaaagtggctgcagcagagttagctgtctagcgcctagcaaggtgcctttgtacctcaggtgttttaggtgtgagatgtttcagtgaaccaaagttctgataccttgtttacatgtttgtttttatggcatttctatctattgtggctttaccaaaaaataaaatgtccctaccagaagccttaaaaaaaaaaaaaaaaaaaaaaaagggcggcc

SEQ ID NO: 307 - DNA, 666 bp, Homo sapiens
  misc_feature (588): n equals a,t,g, or c
  misc_feature (664): n equals a,t,g, or c
gtgccctgactgcctgacggccgcgcagggccttgcaggaccgctggggaggatgttgttaacgtaaagagccaggctgatgaggaaggttcatgagtcctttgggtataagcgggagttggggcggccggaaggcagatgactctgagaagggcaagcactttaaccttttaagcccaaccagatgagttgcctgcagttttggaggccttcagagcatttcactagacctctgtctgtgtcggtccagtgtctttagccaagctttgattaaagatgacttccttgtttgctcaagaaattcgcctttctaaaagacatgaagaaatagtatcacaaagattaatgttacttcaacaaatggagaataaattgggtgatcaacacacagaaaaggcatctcaactccaaactgttgagactgcttttaaaaggaaccttagtcttttaaaggatatagaagcagcagaaaagtcactacagaccaggattcacccacttccacggcctgaggtggtttctcttgagactcgttactgggcatcatagaagaatatattcccaaatgggaacagtttcttttagggngagcaccatatccttttgctgttgaaaatcaaaatgaagcagaaaataccattcaaaatgaggcacagcgataacntc

SEQ ID NO: 308 - DNA, 2171 bp, Homo sapiens
  misc_feature (1248): n equals a,t,g, or c
  misc_feature (2162): n equals a,t,g, or c
  misc_feature (2166): n equals a,t,g, or c
  misc_feature (2168): n equals a,t,g, or c
cctcggcggtacccggagcttcaggccccaccggggcgcggagagtcccaggcccggccgggaccgggacggcgtccgagtgccaatggctagctctaggtgtcccgctccccgcgggtgccgctgcctccccggagcttctctcgcatggctggggacagtactgctacttctcgccgactgggtgctgctccggaccgcgctgccccgcatattctccctgctggtgcccaccgcgctgccactgctccgggtctgggcggtgggcctgagccgctgggccgtgctctggctgggggcctgcggggtcctcagggcaacggttggctccaagagcgaaaacgcaggtgcccagggctggctggctgctttgaagccattagctgcggcactgggcttggcctgccgggacttgccttgtyccgagagctgatctcatggggagcccccgggtccgcggatagcamcaggctactgcactggggaagtcaccctaccgccttcgttgtcagttatgcagcggcactgcccgcagcagccctgtggcacaaactcgggagcctctgggtgcccggcggtcagggcggctctggaaaccctgtgcgtcggcttctaggctgcctgggctcggagacgcgccgcctctcgctgttcctggtcctggtggtcctctcctctcttggggagatggccattccattctttacgggccgcctcactgactggattctacaagatggctcagccgataccttcactcgaaacttaactctcatgtccattctcaccatagccagtgcagtgctggagttcgtgggtgacgggatctataacaacaccatgggccacgtgcacagccacttgcagggagaggtgtttggggctgtcctgcgccaggagacggagtttttccaacagaaccagacaggtaacatcatgtctcgggtaacagaggacacgtccaccctgagtgattctctgagtgagaatctgagcttatttctgtggtacctggtgcgaggcctatgtctcttggggatcatgctctggggatcagtgtccctcaccatggtcaccctgatcaccctgcctctgcttttccttctgcccaagaaggtgggaaaatggtaccagttgctggaagtgcaggtgcgggaatctctggcaaagtccagccaggtggccattgaggctctgtcggccatgcctacagttcgaagctttgccaacgaggagggcgaagccagnaagtttagggaaaagctgcaagaaataaagacactcaaccagaaggaggctgtggcctatgcagtcaactcctggaccactagtatttcaggtatgctgctgaaagtgggaatcctctacattggtgggcagctggtgaccagtggggctgtaagcagtgggaaccttgtcacatttgttctctaccagatgcagttcacccaggctgtggaggtactgctctccatctaccccagagtacagaaggctgtgggctcctcagagaaaatatttgagtacctggaccgcacccctcgctgcccacccagtggtctgttgactcccttacacttggagggccttgtccagttccaagatgtctcctttgcctacccaaaccgcccagatgtcttagtgctacaggggctgacattcaccctacgccctggcgaggtgacggcgctggtgggacccaatgggtctgggaagagcacagtggctgccctgctgcagaatctgtaccagcccaccgggggacagctgctgttggatgggaagccccttccccaatatgagcaccgctacctgcacaggcaggtggctgcagtgggacaagagccacaggtatttggaagaagtcttcaagaaaatattgcctatggcctgacccagaagccaactatggaggaaatcacagctgctgcagtaaagtctggggcccatagtttcatctctggactccctcagggctatgacacagaggtagacgaggctgggagccagctgtcagggggtcagcgacaggcagtggcgttggcccgagcattgatccggaaaccgtgtgtacttatcctggatgatgccaccagtgccctggatgcaaacagccagttacaggtggagcagctcctgtacgaaagccctgagcggtactnccgntnaag

SEQ ID NO: 309 - DNA, 6163 bp, Homo sapiens
  misc_feature (6132): n equals a,t,g, or c
  misc_feature (6135): n equals a,t,g, or c
  misc_feature (6158): n equals a,t,g, or c
aattcggcacgagcacagcctgagcatactctgtgcattaggaagacctgagtgcatttcccaccattgtcctttccacattatgttgtagctggctggctgtmaggcgactacaagactgagggtsttgtgccttatagatstttgtatcccccatggctgacacatagtaggtactcagtaaatggttttataatgaatcagtgaacattttgcttctatagaagtgtaccttctttgtttctatattatgaaacctctttattagaatttgtgattgattctgacagtgtatagatttaccttatattgtctttattttccatgagctactaagtcattagagatactctgaagcatagttagtttaggaaatcacttcatattgattgtattagaattatcttggaattgaagatatatccctagagcaggggaccccaacccccaggccatgggccacacagcaggaagaggtgagtggtgggccattgaggagcttcatctgtatttatggctacttcccatcactcgaattaccacctgaactccacctcttgtcagctcagtggcagcattagattctcatagragcacaaatcctattgtgaactctgcatgcaagggatctaggctatgcgctccttatgagaatctaatgcctgatgacctgaggtgkaacagtttcatcctgaaaccacccttcaccctgcagtctgtggaaaaattgtcttccacaaaactggtccctggtgccaaaaatgktggggaccgctgctctagagagaggtcatgatatcataccaaccaaatggaaatracaaatgttttatgtcaagtgttaattgcagaaataaatcttttttttttttttttggtagaaaacaaagaggcatactctgatttttatactctgtttttgcaggtgctcttttctttgaatggagatttgatgagcaagtggttaggatgcagggagagctactatgggtgatattttccttgtttaggagctgtgagttaaaattgtatcctttctggtttatctaaggaaagtcaaatcttgacagaaaacatttttccttggaaggtcaactctcagacattgtattttggtttccctcagtcctcataacttccttcttgctgaacatattttattctcttttcagagaaggaaaataaaaaggattctaaaagtttgatgcattggaaaaatttccttgaggcatttagcaacacatagaaaatgggctttgattcttttccaaaacttttagccatagggtcttttatagacagggatagtaaaatgaaaattgagaaatataagatgaaaaggaatgrtaaaaatatcttttagggggcttttaattggtgatctgaaatcttgggagaagctgttcttttcaggcctgaggtgctcttgactgtcgcctgcgcactgtgtaccccgagcaacattctaagggtgtgctttcgccttggctaactcctttgacctcattcttcatatagtagtctaggaaaaagttgcaggtaatttaaactgtctagtggtacatagtaactraatttctattcctatgagaaatgagaattatttatttgccatcaacacattttatactttgcatctccaaatttattgcggcgagacttgtccattgtgaaagttagagaacattatgtttgtatcatttctttcataaaacctcaagagcatttttaagcccttttcatcagacccagtgaaaactaaggatagatgtttaaaaactggaggtctcctgataaggagaacacaatccaccattgtcatttaagtaataagacaggaaattgaccttgacgctttcttgttaaatagatttaacaggaacatctgcacatcttttttccttgtgcactatttgtttaattgcagtggattaatacagcaagagtgccacattataactaggcaattatccattcttcaagacttagttattgtcacactaattgatcgtttaaggcataagatggtctagcattaggaacatgtgaagctaatctgctcaaaaagatcaacaaattaatattgttgctgatatttgcataattggctgcaattatttaatgtttaattgggttgatcaaatgagattcagcaattcacaagtgcattaatataaacagaactggtggcacttaaaatgataatgattaacttatattgcatgttctcttcctttcacttttttcagtgtctacatttcagaccgagtttgtcagcttttttgaaaacacatcagtagaaaccaagattttaaaatgaagtgtcaagacgaaggcaaaacctgagcagttcctaaaaagatttgctgttagaaattttctttgtggcagtcatttattaaggattcaactcgtgatacaccaaaagaagagttgacttcagagatgtgttccatgctctctagcacaggaatgaataaatttataacacctgctttagcctttgttttcaaaagcacaaaggaaaagtgaaagggaaagagaaacaagtgactgagaagtcttgttaaggaatcaggttttttctacctggtaaacattctctattcttttctcaaaagattgttgtaagaaaaaatgtaagacaaaaaaaaaaaaaaaaaacagaggcagaggcaggcagtagcaagaaagcagagcgtaacatcagctagatggtaacatgcaatgtcagctctcttgaagacatgggaaacctaagttacaccttgggttaaaattcttcaccgtattagttttgttgcttcataaaatttacctaagcaagtggtcttgcttgcctcaaatccaagcagtcttgaacacttggaggcaattaatgagtatatcttagtcaaaagaattgttggagctttttattaaagctgcagtttcagttctgcttttggggaattgtgctatgaaagcagctgccaaaataagctcatttattttcttcaatcccactcagtgctcagtcactatattctgtttccttttttttttttcaagttgcatatttggtttccccttatgattgggaaagatgaattttcagcagaaaacagtgtttgttcactttcaaagagtgatagtttctaaaacatttagagcaataaatattcatcagaggtaccaagtaagccagcagaagagttaagggttagagaaatcccttatttcatgtcttgactctaaaatgatcaaagtacttttccttgtaatgtggatttcttcttatgcggatatgcaaaaacttcagttatacgtagtaatgctagcaggtaattttagtggacattttataacaactgtcactttgttttgccacatgtagagtttgttcagctattttccagatatctccccacaaaaggaggcaaagggtaccagcttttcaatgagcattacctattacttggcaaagatgatgaagactctattaatagttcatttgataaatgttgacataaccaacaatagagattaggaagttagttttaagaaatcaatagcatatagacattaccctcatggagtttgtattctactacttgaactgattgtagctataaaagcatagttagatagctgaatagttagatcataagcaaagaaggccagaacacatctcttatcaagaaatcaatgaatagtttatctcatttttaaagcaactttatccttctttaattccttcctttcttctagtgcaaaactacttaataaggttggtgtttaggttagtgttcacaccattcctcatctggtgtgaattaccttctctttctttactatttactaccaacctagtacatgtgttgactgaattcttttcaaacaatgttgagttatcatggtgcacctaataaattaacaccacagattacagcatccttgctgattttctcagcaaagccagattagatggaaataaacaaagaaaatgatcctagagtgaatttttctagaaaatatctattatgaaccatgctgtttaaagtattagcttgaaggtgatggatccagctattcagaaaataactttcatataaccatgattttgcacagtatgaggtcttaaatgtgtggaaagagataaattttttatcattaccacaaaccccttttaaagattcaaaggtggaagaaagtgatttattttttctcttcagcatacatatataaaagacttgtcagatgtttaatttggggaggttgataatgaaacatatcaacagagtatagtagttatagtagtgtttgtgggtaaataatttcctggggtcagacatatataaacatatttgcttcaaaatgataaaggcatgaaatcagtcttaaaaattgaaatgggggtgatgggggagaaaaagaagaacaaatttgaagtgccctttcaaatctgctggatacaagtattgaagttttaagtcatcttattctgtctgaaagtgtatttttcattctacaatagacccaatcaacaagacgtataacttgagttgcatgatgttcagtttatgtaatctactgttgggatggtaagaattgatgtaggctgtggtgtaagaatgaattaaaatatagtttcactggcttttctctacatatccactatcacaatggctaggtttcctgttgctcactgttggattctggagaaaaatttaatgaaagatgatatcagaggaagaataagtggaggtagagaagaaaggagtgatagaggaggggaaaaaaacaaaacatatttttgtgttatccaaaggagctttttccttattctgtcaagcattgagatcttcttcagctttcaatgtagttgctaaatacaaataatgctactaggtagtgactaaatatagcaaacacttcatcagatattagaattaggtcacactattgaggttataatctgaaggttgtgttacatagaaaccactttagattattatcaacttggactaggctttattttataatagcatagtaagtaatatctattgtgtcatttcttcaaccattttattctaagatccatgaagcttcttgaggccaaataaaataataagtttagacaagaagtagattgtgactttttttcccttagagatactatttactatctcctatcctgataggtggaaggtttactgaattggaaattggttgactattagtttttaactaaaatgtgcaataacacattgcagtttcctcaaactagtttcctatgatcattaaactcattctcagggttaagaaaggaatgtaaatttctgcctcaatttgtacttcatcaataagtttttgaagagtgcagatttttagtcaggtcttaaaaataaactcacaaatctggatgcatttctaaattctgcaaatgtttcctggggtgacttaacaaggaataatcccacaatatacctagctacctaatacatggagctggggctcaacccactgtttttaaggatttgcgcttacttgtggctgaggaaaaataagtagttcgaggaagtagtttttaaatgtgagcttatagatagaaacagaatatcaacttaattatgaaattgttagaacctgttctcttgtatctgaatctgattgcaattactattgtactgatagactccagccattgcaagtctcagatatcttagctgtgtagtgattcttgaaattctttttaagaaaaattgagtagaaagaaataaaccctttgtaaatgaggcttggcttttgtgaaagatcatccgcaggctatgttaaaaggattttagctcactaaaagtgtaataatggaaatgtggaaaatatcgtaggtaaaggaaactacctcatgctctgaaggttttgtagaagcacaattaaacatctaaaatggctttgttacaccagagccatctggtgtgaagaactctatatttgtatgttgagagggcatggaataattgtattttgctggcaatagacacattctttattatttgcagattcctcatcaaatctgtaattatgcacagtttctgttatcaataaaacaaaagaatcctgaaaaaaaaaaaaaaaaaaaaggggggcgcnctnaagatcccccaaggggcccaacntaccc

SEQ ID NO: 310 - DNA, 2086 bp, Homo sapiens
  misc_feature (1763): n equals a,t,g, or c
  misc_feature (1769): n equals a,t,g, or c
tcccgggtcaagccacgcgtccgcggmacgwgggtgcggacgcccggctcccggcgtggacgccatggtgctgtgcccggtgattgggaagctgctgcacaagcgcgtggtgctggccagcgcctccccacgccgtcagagatcctcagcaacgcgggtctcaggtttgaggtggtcccctccaagtttaaagagaagctggacaaagcctccttcgctactccgtatgggtacgccatggagaccgccaagcagaaggccctggaggtggccaaccggctgtaccagaaagacctgcgggcccccgacgtggtcattggagcggacacgatcgtgacagtcggggggctgattctggagaagccggtggacaagcaggacgcctacaggatgctgtcccggttgagtgggagagaacacagcgtgttcacaggtgtcgcgatcgtccactgctccagcaaagaccatcagctggacaccagggtctcggaattctacgaggaaacgaaggtgaagttctcggagctgtccgaggagctgctctgggaatacgtccacagcggggagcccatggacaaagctggcggctacgggatccaggccctgggcggcatgctggtggagtccgtacacggggactttctgaacgtggtgggattcccgctgaaccacttctgcaagcagctggtgaagctctactacccgccccgyccggaggacctgcggcggagtgtcaagcacgactccatcccggccgcggacaccttcgaagacctcagtgacgtggaggggggcggctcggagcccactcagagggacgcgggcagccgcgatgagaaggccgaggcgggagaggcgggacaggccacggcagaggctgagtgtcacaggactcgggagaccctgcctccgttcccgacacgcctcctggagctgattgagggctttatgctatccaagggcctgctcaccgcttgcaaactgaaggtgttcgatttgttaaaagatgaagcaccccagaaggctgcggatattgccagcaaagtggacgcctctgcgtgtggaatggagaggcttctggacatctgtgctgccatggggctcctggagaagacagagcaaggttacagtaacacagagacagcgaacgtctacctggcatcggatggcgaatactctctgcacggcttcatcatgcacaataatgacctcacatggaacctctttacatacctggagtttgccatccgagagggaacaaaccagcaccacagggcgttggggaagaaggcggaagatctgttccaggatgcgtactaccagagcccggagacgcggctgaggttcatgcgggccatgcacggcatgacgaagctgactgcgtgccaggtggccacggccttcaatctgtcccgcttctcctccgcctgcgacrtgggaggctgcaccggtgcactggcccgagagctggcccgtgagtaccctcgtatgcaggtgactgtgtttgacctcccagacattatcgagctggccgcccacttccaaccccccggaccgcagcagtgcagatccacttcgcagcaggtgactttttcagggaccccctccccagcgctgagctgtacgtcctgtgccggatcctgcatgaytggccagacgacaaagtccacaagttactcagcagggtcgccgagagctgcaagccaggggccggcctgctgctggtggagacgctcctggatgaggagaagagggtggcgcangcgccntgatgcagtcactgaacatgctggtgcagactgaaggcaaggagcggagcctgggcgagtatcagtgcttgctggagctgcacggcttccaccaggtgcaggtggtgcacttggggggtgtcctggatgccatcttggccaccaaagtggccccctgaagcccaggcagcatgttcattatagggatgtcctcccccaggctgcaggtggaccgcccggtccccaagtaccataggacagtcacataggagcgtgtagtcgtgactgaataaagaaagcaaaagccaaaaaaaaaaaaaaaaaaaatttgggggggg

SEQ ID NO: 311 - DNA, 2163 bp, Homo sapiens
gcggccgcagctccttcaccagcttggtggtgggcgtgttcgtggtctacgtggtgcacacctgctgggtcatgtacggcatcgtctacacccgcccgtgctccggcgacgccaactgcatccagccctacctggcgcggcggcccaagctgcagctgagcgtgtacaccacgacgaggtcccacctgggtgctgagaacaacatcgacctggtcttgaatgtggaagactttgatgtggagtccaaatttgaaaggacagttaatgtttctgtaccaaagaaaacgagaaacaatgggacgctgtatgcctacatcttcctccatcacgctggggtcctgccgtggcacgacgggaagcaggtgcacctggtcagtcctctgaccacctacatggtccccaagccagaagaaatcaacctgctcaccggggagtctgatacacagcagatcgaggcggagaagaagccgacgagtgccctggatgagccagtgtcccactggcgaccgcggctggcgctgaacgtgatggcggacaactttgtctttgacgggtcctccctgcctgccgatgtgcatcggtacatgaagatgatccagctggggaaaaccgtgcattacctgcccatcctgttcatcgaccagctcagcaaccgcgtgaaggacctgatggtcataaaccgctccaccaccgagctgcccctcaccgtgtcctacgacaaggtctcactggggcggctgcgcttctggatccacatgcaggacgccgtgtactccctgcagcagttcgggttttcagagaaagatgctgatgaggtgaaaggaatttttgtagataccaacttatacttcctggcgctgaccttctttgtcgcagcgttccatcttctctttgatttcctggcctttaaaaatgacatcagtttctggaagaagaagaagagcatgatcggcatgtccaccaaggcagtgctctggcgctgcttcagcaccgtggtcatctttctgttcctgctggacgagcagacgagcctgctggtgctggtcccggcgggtgttggagccgccattgagctgtggaaagtgaagaaggcattgaagatgactattttttggagaggcctgatgcccgaatttcagtttggcacttacagcgaatctgagaggaaaaccgaggagtacgatactcaggccatgaagtacttgtcatacctgctgtaccctctctgtgtcgggggtgctgtctattcactcctgaatatcaaatataagagctggtactcctggttaatcaacagcttcgtcaacggggtctatgcctttggtttcctcttcatgctgccccagctctttgtgaactacaagttgaagtcagtggcacatctgccctggaaggccttcacctacaaggctttcaacaccttcattgatgacgtctttgccttcatcatcaccatgcccacgtctcaccggctggcctgcttccgggacgacgtggtgtttctggtctacctgtaccagcggtggctttatcctgtggataaacgcagagtgaacgagtttggggagtcctacgaggagaaggccacgcgggcgccccacacggactgaaggccgcccgggctgccgccagccaagtgcaacttgaattgtcaatgagtatttttggaagcatttggaggaattcctagacattgcgttttctgtgttgccaaaatcccttcggacatttctcagacatctcccaagttcccatcacgtcagatttggagctggtagcgcttacgatgcccccacgtgtgaacatctgtcttggtcacagagctgggtgctgccggtcaccttgagctgtggtggctcccggcacacgagtgtccggggttcggccatgtcctcacgcgggcaggggtgggagccctcacaggcaagggggctgttggatttccatttcaggtggttttctaagtgctccttatgtgaatttcaaacacgtatggaattcattccgcatggactctgggatcaaaggctctttcctcttttgtttgagagttggttgttttaaagcttaatgtatgtttctattttaaaataaatttttctggctgtggcaaaaaaaaaaaaaaaaaaaaaaaaaaaaaaaaaaaaaaaaaaaaaaaaaaaa

SEQ ID NO: 312 - DNA, 1397 bp, Homo sapiens
  misc_feature (1397): n equals a,t,g, or c
ctagctgggaggctgacggcccgcgggcgtaacrgaactgcagccgcgagctcctggaggcggcgggatggaggcggcggccgagcctggaaacctggccggcgtcaggcacatcatcctggtcctctcaggaaaggggggcgttgggaaaagcaccatctccacggagctggccctggcactgcgccatgcaggcaagaaggtgggaatcctggatgtggacctgtgtggccccagtataccccgcatgctcggggcgcagggcagggctgtgcaccagtgcgaccgcggctgggcacccgtcttcctggaccgggagcagagcatctcgctcatgtctgtgggcttcctgctggagaagccggacgaggccgtggtgtggagaggccccaagaaaaacgcgctgataaagcagtttgtgtccgacgtggcctggggggagctggactacctggtggtggacacgcccccggggacctccgatgagcacatggccaccatagaagccctgcgtccctaccagcccctgggggccctcgtggtcaccacgccccaggcggtgtccgtgggggacgtgaggcgcgagctgaccttctgtaggaagacgggcttgcgggtgatgggaatcgtggagaatatgagcggcttcacctgcccacactgcacggagtgcaccagcgtcttctccaggggcggcggagaggagctggcccagctcgccggggtgcccttcttaggctccgtgcccctggaccctgcgctcatgaggaccctggaggagggccacgacttcatccaggagttccccgggagccccgccttcgctgcactcacctccatagcccagaagattctggacgcgacgcccgcgtgcctcccctgactaaggccaccttgcagccgctttccagggccaccaagggctctgctccagcctctcagagaaacagaggcctgggctcggttcccgggccctgcaggggcaggcccaggcagcgtcagcgggagagcttctccccgaccagcccagccccaggatgtgtcgcaccagcagctctgcctggttggcctgcagtgccgtggtctgcgtgctctgcagctgtgagacgggggcggcctgggctctcttcccatccatgttgcctacctgtgcccctggcagccgcgtgtccacacagttagcggagcgcaggacttctgcagtcctcaggtgaccccgggcctccagcaccctgggtcgctgtcatctgtgtttagctcggggagtgcyccctaagggggcgaactgacctcaggcatgtcttgtaactgtagaggcgcctgccattaaacgtgtccgctgctgtggcgacagaaaaaaaaaaaaaaaaaaaaaaaaaaaaaaaaaaaaaaaaaan

SEQ ID NO: 313 - DNA, 4106 bp, Homo sapiens
  misc_feature (344): n equals a,t,g, or c
ttactatcagacagcccccaaagcagattacagccaaggtgcaactcagtatactcaagcccagcaaactcgacaagtgacagccataaaaccagccacaccaagtccagctaccactactttctccatctatcctgtatcctccaccgtacagccagtagcagctgcggctactgtggtgccatcctatactcagagtgctacttacagtaccacagcagttacatattctggtacgtcttattcaggttatgaagcagcagtgtattcagctgcatcttcctactatcaacagcagcagcagcaacagaagcaggcagcagcagcagctgtgtgctgtcganactagctgcctggacagggaccacctttactaaaaaagcaccattccaaaataaacaactgaaaccaaaacagcctcccaaaccaccacagattcactattgtgatgtttgtragatcagctgtgtggaccacagacttataaagaacatttagaaggacagaaacataaaaaaaaagaagctgcattgaaagcctcacaaaataccagcagcagcaacagttctactcgtgggactcaaaatcagctacgttgtgagctctgcgatgtgtcttgtacaggagcagatgcgtatgctgcccacattcgtggtgctaagcatcagaaagtggttaagttacacacaaaacttggtaaacccattccatcaacagaaccaaatgttgttagccaagctacttcttcaacagctgtatctgcttcaaagccgactgcctctccttcaagcattgcagcaaacaattgtactgtgaatacgtcatcaattgcaacgtcttcaatgaagggtcttacgactacaggaaactcgtctcttaatagcacatctaacactaaagtatcagcagtgcctacaaatatggctgccaagaaaacatctacccccaaaataaattttgttggtggtaataagctgcagtcaacaggaaataaagcagaagacacaaaaggaaccgaatgtgttaaaagtactcctgtcacttctgctgtgcagattcctgaagtaaagcaagacacagtgtcagaaccagtcacacctgcatctcttgctgctttacagagtgatgtgcagccagtgggccatgattatgtggaagaggtacgaaatgatgaaggaaaagtaattcggttccattgtaaattatgcgagtgcagctttaatgatcccaatgctaaggagatgcacttaaaagggcgaagacacagacttcaatataaaaaaaaagtaaatccagatttgcaagtagaagtaaagcctagtattcgagcaagaaagattcaagaagagaaaatgaggaagcaaatgcagaaggaggagtactggcgaagacgagaagaagaggagcgttggagaatggaaatgagacgttatgaagaggacatgtactggaggagaatggaggaagaacaacatcattgggatgatcgccgccgaatgccagatggaggttatcctcatggtcctccaggcccattaggccttctgggagtccgaccaggcatgcctcctcagcctcaggggcctgcacccttacgtcgtcctgactcatctgatgaccgttatgtaatgacmaaacatgccaccatttatccaactgaagaggagttacaggcagttcagaaaattgtttctattactgaacgtgctttaaaactcgtttcagacagtttgtctgaacatgagaagaacaagaacaaagagggagatgataagaaagagggaggtaaagacagagctttgaaaggagttttgcgagtgggagtattggcaaaaggattacttctccgaggagatagaaatgtcaaccttgttttgctgtgctcagagaaaccttcaaagacattattaagccgtattgcagaaaacctacccaaacagcttgctgttataagccctgagaagtatgacataaaatgtgctgtatctgaagcggcaataattttgaattcatgtgtggaacccaaaatgcaagtcactatcacactgacatctccaattattcgagaagagaacatgagggaaggagatgtaacctcgggtatggtgaaagacccaccggacgtcttggacaggcaaaaatgccttgacgctctggctgctctacgccacgctaagtggttccaggctagagctaatggtctgcagtcctgtgtgattatcatacgcattcttcgagacctctgtcagcgagttccaacttggtctgattttccaagctgggctatggagttactagtagagaaagcaatcagcagtgcttctagccctcagagccctggggatgcactgagaagagtttttgaatgcatttcttcagggattattcttaaaggtagtcctggacttctggatccttgtgaaaaggatccctttgataccttggcaacaatgactgaccagcagcgtgaagacatcacatccagtgcacagtttgcattgagactccttgcattccgccagatacacaaagttctaggcatggatccattaccgcaaatgagccaacgttttaacatccacaacaacaggaaacgaagaagagatagtgatggagttgatggatttgaagctgaggggaaaaaagacaaaaaagattatgataacttttaaaaagtgtctgtaaatcttcagtgttaaaaaaacagatgcccatttgttggctgtttttcattcataataatgtctacattgaaaaatttatcaagaatttaaaggatttcatggaagaaccaagtttttctatgatattaaaaaatgtacagtgttaggtattatttgaatggaaagacacccaaaaaaaaaaatgtgctccgactagggggaaaacagtagttccgattttttcccattatttttattttattttctggttgccctagcttccccccctatttttgtgtcttttattaactagtgcattgtcttattaaatcttcactgtatttaatgcaggatgtgtgcttcagttgctctgtgtattttgatattttaatttagaggttttgtttgctttttgacactagttgtaagttactttgttatagatggtatcctttaccccttcttaatattttacagcagtacgtttttttgtaacgtgagactgcagagtttgtttttctatatgtgaaggattacaacacaaaaagttatcctgccattcgagtgctcagaactgaatgtttctgcagatcttgtggcatttgtctctagtgtgatatataaaggtgtaattaagacagagttctgttaatctaatcaagtttgctgttagttgtgcattagcagtataaaagctaatatatactatatggtcttgcaacagttttaaagcctctgcataattgataataaaaatgcatgacattcttgtttttaatagacttttaaaatcataattttaggtttaacacgtagatctttgtacagttgactttttgacatagcaaggccaaaaataactttctgaatatttttttcttgtgtataagtggaaagggcatttttcacatataagtgggctaaccaatattttcaaaagaacttcatcattgtacaactaacaacagtaactagcccttaattatggtgacagttccttattggtgtgtgtgagattactctagcaactattacagtataacacagatgatcttctccacacaccccatcacccagataatttacagttctgttaacagtgaggttgataaagtattactgataaaaaattatctaaggaaaaaaacagaaaattatttggtgtggccatcttacctgcttatgtctcctacacaaagctaaatattctagcagtgatgtaatgaaaaattacatcttactgttgatatatgtatgctctggtacacagatgtcattttgttgtcacagcactacagtgaaatacacaaaaaatgaaattcatataatgacttaaatgtattatatgttagaattgacaacataaactacttttgctttgaaatgatgtatgcttcagtaaaatcatattcaaatttaaaaaaaaaaaaaaaaaaaactcga

SEQ ID NO: 314 - DNA, 532 bp, Homo sapiens
  misc_feature (497): n equals a,t,g, or c
  misc_feature (498): n equals a,t,g, or c
  misc_feature (502): n equals a,t,g, or c
  misc_feature (524): n equals a,t,g, or c
gactggacccgggagacatcacagcgctgggctaggggcgcggcttgaactcgcctaaagagctgcgccctctcacccgtgccgccccagccgctgccgcctgcaccggacccggagccgccatgcccaagtgtcccaagtgcaacaaggaggtgtacttcgccgagagggtgacctctctgggcaaggactggcatcggccctgcctgaagtgcgagaaatgtgggaagacgctgacctctgggggccacgctgagcacgaaggcaaaccctactgcaaccacccctgctacgcagccatgtttgggcctaaaggctttgggcggggcggagccgagagccacactttcaagtaaaccaggtggtggagaccccatccttggctgcttgcagggccactgtccaggcaaatgccaggccttgtccccagatgcccagggctcccttgttgcccctaatgctctcagtaaacctgaacacttggaaaaaaaaaaaanngggnggcgttttaaagattcctcganggggccaa

SEQ ID NO: 315 - DNA, 1938 bp, Homo sapiens
  misc_feature (1270): n equals a,t,g, or c
  misc_feature (1455): n equals a,t,g, or c
gcggctttggctctgggcgaggcggcggggccggggcttctcggacgaggcgggcttggcgggcgcccggcagctacagctgcaggaggcggccggcgaccccgacgcgccgcccaagaagcggctgcgggcagccgaggcggccgaggcggcggcggcggcggcggcggccggcagcgggaaactggaggagcggctctactcggtgctgtgctgcaccgtgtcctggacctgcccaaggcctccgtgtaccagtgtactaatggtcacttgatgtgcgctggctgttttatccacctactagcagatgcccggctgaaggaggagcaggccacgtgccccaattgtcgttgtgagatcagtaagagcctctgctgccggaacctggccgtggagaaagccgtgagcgagctgccttcagagtgtggcttctgcctgcgccagtttccccgctccctcctggagaggcaccagaaagaggaatgccacggacagggtaacccagtgcaagtacaaacgcatcggctgcccatggcacggccccttccatgagctgacggtgcacgaggctgcgtgcgcccacccgaccaagacaggcagtgagctgatggagatcctggatgggatggaccagagccaccgcaaggagatgcagctgtacaacagcatcttcagcctgctcagcttcgagaagattggctacacagaggtccagttccggccgtaccgcacagacgacttcatcacgcgcctgtactatgagacgcccaggttcacagtgctgaaccagacgtgggtcctgaaggctcgagtcaacgactcggagcgtaaccccaacctgtcctgcaagcgtacgctctccttccagctcctcctcaagagcaaggtcacggcaccgctggagtgctccttcctgctgctcaagggcccctacgacgacgtgaggatcagccccgtcatctaccactttgtcttcaccaacgagagcaacgagacggactacgtgccactgcccatcattgactccgtggagtgcaacaagctgctggctgccaagaacatcaacctgcggctcttcctgttccagatacagaagtagggcggggcctcaggatgtccgaggagcccacgggcggcatcccagcaccgctgccctgtccacctggctggcagctgcttcacaggactatctgatcactttagcaaaggaggagaacaaacgaagccaacacagggcaagtctgcatgcgtgcgcgacggggcccccgcntccggctcacccccccgacccctgcctcccctccttccgagggccgccagaggctgggctgacccgaagaggagacggtgcaccaggcgccccgaggctaagagacggtggcagcaaggaggccgagaggcacagcgaccctgccccagcccttctgtgcagtcaggcggcggtgctgctccatnctgcgggttccggcggggcgcgggggccttgctgacatcagacgggatatccgaatatctgatagcaattaaaaggcagccttgtttcgtactttctgttttgttcgaggggaaggcatggctgtgaatggacagcgtgggggctttggtttggcctgggggtcagagcctgccccgcccccatctgtgtgcccgcacacgtcccccgaggaaagactcagagacactgcctccccctacgctctgtcatggggtcttgagactgaggcttgggcaggaagatccaggtagggtcggggctgccctgccaaccggccgctcccagggagacaggactcagccaccagggctcagcaggcattttcggaaagcagggtgaaattgtctcttcccaggaaaaagattaaactccttgcaggctcttggataagttacacaaaaaaaaaaaaaaaaagggcgcccgctcgcgatctagaactagtc

SEQ ID NO: 316 - DNA, 818 bp, Homo sapiens
  misc_feature (55): n equals a,t,g, or c
  misc_feature (814): n equals a,t,g, or c
  misc_feature (818): n equals a,t,g, or c
gcggccgcccggcgcccccagcagcccgagccggggcgcacagccggggcgcagncgcgccccccgccgcgattgacatgatgtttccacaaagcaggcattcgggctcctcgcacctaccccagcaactcaaattcaccacctcggactcctgcgaccgcatcaaagacgaatttcagctactgcaagctcagtaccacagcctcaagctcgaatgtgacaagttggccagtgagaagtcagagatgcagcgtcactatgtgatgtactacgagatgtcctacggcttgaacatcgagatgcacaaacaggctgagatcgtcaaaaggctgaacgggatttgtgcccaggtcctgccctacctctcccaagagcaccagcagcaggtcttgggagccattgagagggccaagcaggtcaccgctcccgagctgaactctatcatccgacagcagctccaagcccaccagctgtcccagctgcaggccctggccctgcccttgaccccactacccgtggggctgcagccgccttcgctgccggcggtcagcgcaggcaccggcctcctctcgctgtccgcgctgggttcccaggcccacctctccaaggaagacaagaacgggcacgatggtgacacccaccaggaggatgatggcgagaagtcggattagcagggggccgggacagggaggttgggargggggacaraggggagacagaggcacggagagaaaggaatgtttagcacaagacacagcggagctcgggattggctaaaytccatagtattatgktggcccgggggggggcccanccan

SEQ ID NO: 317 - DNA, 837 bp, Homo sapiens
gggcacgagcgacatggagctgttcctcgcgggccgccgggtgctggtcaccggggcaggcaaaggtatagggcgcggcacggtccaggcgctgcacgcgacgggcgcgcgggtggtggctgtgagccggactcaggcggatcttgacagccttgtccgcgagtgcccggggatagaacccgtgtgcgtggacctgggtgactgggaggccaccgagcgggcgctgggcagcgtgggccccgtggacctgctggtgaacaacgccgctgtcgccctgctgcagcccttcctggaggtcaccaaggaggcctttgacagatcctttgaggtgaacctgcgtgcggtcatccaggtgtcrcagattgtggccaggggcttaatagcccggggagtcccaggggccatcgtgaatgtctccagccagtgctcccagcgggcagtaactaaccatagcgtctactgctccaccaagggtgccctggacatgctgaccaaggtgatggccctagagctcgggccccacaagatccgagtgaatgcagtaaaccccacagtggtgatgacgtccatgggccaggccacctggagtgacccccacaaggccaagactatgctgaaccgaatcccacttggcaagtttgctgaggtagagcacgtggtgaacgccatcctctttctgctgagtgaccgaagtggcatgaccacgggttccactttgccggtggaagggggcttctgggcctgctgagctccctccacacacctcaagccccatgccgtgctcatcctacccccaatccctccaataaacctgattctgctgcccaaaaaaaacga

SEQ ID NO: 318 - DNA, 1448 bp, Homo sapiens
  misc_feature (878): n equals a,t,g, or c
  misc_feature (1198): n equals a,t,g, or c
  misc_feature (1395): n equals a,t,g, or c
  misc_feature (1397): n equals a,t,g, or c
  misc_feature (1445): n equals a,t,g, or c
gggtctggagagcaggactgggtcaacaggcccaagaccgtgcgcgacacgctgctggcgctgcaccagcacggccactcggggccttcgagagcaagtttaagaaggagccggccytgactgcaggcaggttgttgggtttcgaggccaacggggccaacgggtctaaagcaggtaggggcggctgtgaagtgagggggtctaggggagaaaaggggacggagagcagaggaagggtggttctttggattcaccattttaccccagcccagaaacaacaaacaccccacttcctgatctcctgaggcggaaccagtgcttggtggcaacgtgttcatgtctgaagcagcataacaaagaatgagtcagactgggctgatacgctctgaacacggggttttcctttcccagcacattcttggatgggagcatgagggcaccagtcacctttwaacctattgggggacattagcagtcacatgttgagtgcaaacgaggtacttttgtgcatgtktacaaacaggcagttacaagcgtgtcattttcagtggctccattttaaatcagtctgctgcctcagaatcccgtacgcctgaaggttttaagttgcatgtgcacctgaaactcgtatatgagtattttctgtctgtgcttttagagaggaggaattctgtaacgacttttgtttcgggttaggaagagaatgatctctttcagtgcaccgccacttatgttacctttttccttttatttctttgtgtttccagttgcaagaacagcaaggaaaaggaagccctctccagaaccagaaggtgaagtcgggccccctaagatcaacggagaggcccagccgtggstgtccacatccacagaggggntcaagatccccatgactcctacatcctcttttgtgtctccgccaccacccactgcctcacctcattccaaccggaccacaccgcctgaagcggcccagaatggccagtcccccatggcagccctgatcttagtagcagacaatgcagggggcagtcatgcctcaaaagatgccaaccaggttcactccactaccaggaggaatagcaacagtccgccctctccgtcctctatgaaccaaagaaggctgggccccagagaggtggggggccagggagcaggcaacacaggaggactggagccagtgcaccctgccagcctnccggacttctctctggcaaccagtgccccgctgtgctgcaccctctgccacgagcggctggaggacaaccattttgtgcagtgccgtccgtcctttgacaagttctcttccttgctcagacaaagataaacagagggagtagtgagaggcttttccagtggggaaaatgcctctgtgggtcaatgtccctgggcttntnaaggggaattcaacatcttcttgggtgtaagtgaaaaaaaaaaaaacntgg

SEQ ID NO: 319 - DNA, 1493 bp, Homo sapiens
tcgacccacgcgtccggaagtaatgatgacaaaatactctaacctttccttggagagtcataacttctcgctgactgcttcacctcttacaagtctgcccatcccggaagtaatgatgacaaaatactccaaccttttcttggaaagtcataacatctcactgactgaacattccagtgtgccagtggaaaaaaatatcactttagaacgaccttctgctgtagaactcacatgtcagttcacaacttctggggatgtgaattcagtaaatgtgacttggaaaaaaggggatgaacaacttaagaattaccatgtcagtgccacagaaggcatcctgtatacccagtacaagttttccatcattaatagcgaacaactgggaagctattcttgtttctttgaagaggaaaaggaacgaaggggcacatttaatttcggagtccctgaagttcagagaaaaaacaaaccattgatcacttatgtgggggattccgttgtcttggtgtgtaaatgccgacactgtgctcctttaaattggacctggtacagtggtaataggagtgtacaggttcctcttgatgttcacatgaatgaaaagtatgcgatcaatggaacaaacgcgaatgaaacaaggcttaagataatgcagctttcagaagacgataaaggatcttattggtgccatgcaatgttccagttgggcgagagccaagaaagtgttgaactggttgtgataagttatttggtgcccctcaaaccatttcttggaatagttgttgaagttattcttttagtggctattattctgttttgtgaaatgcacacccaaaagaaaaagatgcacatggatgatgggaaagaatttgaacaagttgaacagttgaaatcagacgatagcaacggcatagaaaataatgcccccaggcacagaaaaaatgaagctatgagccagtgaaagcaaaacatcgtgtcaagagtaatgggaagatgtatagtttctacttcagctttgtttatgtttcctgtgaagaacatctgagtttttatttttacaaggatgaaaagtttatgtgatatgctcagcagtagttttgcaataatacctgctatctcagatccaaagatatattttccttctgtgattattttacattaaagcaaggtaaatcatattaaatatgttctatgagctataacccaggataactaatttcatcttggtcatcaagggatgcacagaagagataccagcaaaaccagttagtagtacatgaactaatgtcattcaagacctgcgtataaccaaagaattcattaaagagaaaacttttttgccatttgccttgkttttttttctaattatgcttactatgtgtagaaatatttgtaataattttcatgtaatgktcaccctctgtcatattggataaaaacatctttattaagaaatgaaaaaaaaaaaaaaaaaaaaaaaaaaaaaaaagggcggccgc

SEQ ID NO: 320 - DNA, 609 bp, Homo sapiens
ggcacgagtggcttctgaccctttcttccgccactaccgccagctcaatgagaagctagtgcagctcatcgaagactatagccttgtctcctttatccctctcaacatccaggacaaggagagcatccagcgagtcctgcaggctgtggataaagccaatggatactgtttcggagcccaagagcagcgaacttggaagccatgatgtctgccgcaatgggagccgacttccatttctcttccacactgggcatccaggagaagtacctggcaccctcgaaccagtcagtggagcaggaagccatgcagctgtagcaacaaggtggaccctggagagcaggatgcataatccagcactggggaaagtggaggctcctgatgcaggctgcagacccaagagcaagtcctcccagccagagctggcgggctggcaaggggatattcagctctgcaaaggacttctggccaaaaagccagacatggtgccaagcagaacaccccccatactgtcagtggtgtccgtgagctctggccctgccaccagaaagtcgagcactggtcctagtcaggctgtgatgaaatgtgctacaatacaagagtttattttct

SEQ ID NO: 321 - DNA, 502 bp, Homo sapiens
  misc_feature (458): n equals a,t,g, or c
tagtggatcccccgggctgcaggaattcggcacgagcagagcttcgctcttgctgctcccctgaggtgaactgaagccagcagccccgcatcatgtcaaagctcggccgggccgcccggggcctcaggaagcccgaggtcggcggtgtratccgggcgatcgtgcgggcaggcctggccatgcccgggcccccactaggcccagtgctgggtcagagaggcgtttccatcaaccagttttgcaaggagttcaatgagaggacaaaggacatcaaggaaggcattcctctgcctaccaagattttagtgaagcctgacaggacatttgaaattaagattggacagcccactgtttcctacttcctgaaggcagcagctgggattgaaaagggggcccggcaaacagggaaagaggtggcaggcctggtgaccttgaagcatgtgtatgagattgcccgnatcaaagctcaggatgaggcatttgcctgcaggatgtacccctg

SEQ ID NO: 322 - DNA, 2630 bp, Homo sapiens
  misc_feature (1952): n equals a,t,g, or c
gggcatccagagtacgggtcgagcccgggccatggagcccccctggggaggcggcaccagggagcctgggcgcccggggctccgccgcgaccccatcgggtagaccacagaagctccgggacccttccggcacctctggacagcccaggatgctgttggccaccctcctcctcctcctccttggaggcgctctggcccatccagaccggattatttttccaaatcatgcttgtgaggaccccccagcagtgctcttagaagtgcagggcaccttacagaggcccctggtccgggacagccgcacctcccctgccaactgcacctggctcatcctgggcagcaaggaacagactgtcaccatcaggttccagaagctacacctggcctgtggctcagagcgcttaaccctacgctcccctctccagccactgatctccctgtgtgaggcacctcccagccctctgcagctgcccgggggcaacgtcaccatcacttacagctatgctggggccagagcacccatgggccagggcttcctgctctcctacagccaagattggctgatgtgcctgcaggaagagtttcagtgcctgaaccaccgctgtgtatctgctgtccagcgctgtgatggggttgatgcctgtggcgatggctctgatgaagcaggttgcagctcagaccccttccctggcctgaccccaagacccgtcccctccctgccttgcaatgtcaccttggaggacttctatggggtcttctcctctcctggatatacacacctagcctcagtctcccamccccagtcctgccattggtgctggaccccatgatggccggcggtggccgtgcgcttcacagccctggamttgggctttggagatgcagtgcatgtgtatgacggccctgggccccctgagagctcccgactactgcgtagtctcacccacttcagcaatggcaaggctgtcactgtggagacactgtctggccaggctgttgtgtcctaccacacagttgcttggagcaatggtcgtggcttcaatgccacctaccatgtgcggggctattgcttgccttgggacagaccctgtggcttaggctctggcctgggagctggcgaaggcctaggtgagcgctgctacagtgaggcacagcgctgtgacggctcatgggactgtgctgacggcacagatgaggaggactgcccaggctgcccacctggacacttcccctgtggggctgctggcacctctggtgccacagcctgctacctgcctgctgaccgctgcaactaccagactttctgtgctgatggagcagatgagagacgctgtcggcattgccagcctggcaatttccgatgccgggacgagaagtgcgtgtatgagacgtgggtgtgcgatgggcagccagactgtgcggacggcagtgatgagtgggactgctcctatgttctgccccgcaaggtcattacagctgcagtcattggcagcctagtgtgcggcctgctcctggtcatcgccctgggctgcacctgcaagctctatgccattcgcacccaggagtacagcatctttgcccccctctcccggatggaggctgagattgtgcagcagcaggcacccccttcctacgggcagctcattgcccagggtgccatcccacctgtagaagactttcctacagagaatcctaatgataactcagtgctgggcaacctgcgttctctgctacagatcttacgccaggatatgactccaggaggtggcccaggtgcccgccgtcgtcagcggggccgcttgatgcgacgcctggtacgccgtctccgccgctggggcttgctccctcgaaccaacaccccggctcgggcctctgaggccagatcccaggtcacaccttctgctgctccccttgaggccctagatggtggcacaggtccagcccgtgagggnggggcagtgggtgggcaagatggggagcaggcacccccactgcccatcaaggctcccctcccatctgctagcacgtctccagcccccactactgtccctgaagccccagggccactgccctcactgcccctagagccatcactattgtctggagtggtgcaggccctgcgaggccgcctgttgcccagcctggggcccccaggaccaacccggagcccccctggaccccacacagcagtcctggccctggaagatgaggacgatgtgctactggtgccactggctgagccgggggtgtgggtagctgaggcagaggatgagccactgcttacctgaggggacctgggggctctactgaggcctctcccctgggggctctactcatagtggcacaaccttttagaggtgggtcagcctcccctccaccacttccttccctgtccctggatttcagggacttggtgggcctcccgttgaccctatgtagctgctataaagttaagtgtccctcaggcagggagagggctcacagagtctcctctgtacgtggccatggccagacaccccagtcccttcaccaccacctgctccccacgccaccaccatttgggtggctgtttttaaaaagtaaagttcttagaggatmawaaaaaaaaaaaaaaaaaaaaaaaaaaaagg

SEQ ID NO: 323 - DNA, 1874 bp, Homo sapiens
  misc_feature (67): n equals a,t,g, or c
  misc_feature (1735): n equals a,t,g, or c
tcgacccacgcgtccggccggggcgccctccggaagcttttccaactttccagaagtttctcgggangggcgggaggaggggaacgccatatatagacctggagagccgggagcgcggagagtggaatcggtccgcggctcgagtgggtctctagtccggcgccagccgcccggcccagccctcacaggtccttcgtggtgcataccatccgcctcccagccatgcgcttcctcctgcttaccagcacttgctgcctcctggccatggccctggctgccgaggtgaagaagccagcggccccaggcacagcagagaagctgarccccaaagcggccacgctggcagagcgcagtgctggcctggccttcagcctgtaccaggccatggccaaggaccaggcggtggagaacatcctgctgtcgcctgtggtggtggcctcatccctggggcttgtgtcgctggggggcaaggccaccacagcgtcccaggccaaggcggtgctgagtgcagagcagytgcgtgatgaggaggtgcacgcgggsctkggcgagytgttgcgagctttcagcaacagcacggcgcgcaacgtgacctgaagctgggcagccgcctgtatgggcccagctcggtgarcttcgcggaggactttgtgcgcagcagcaagcagcactacaactgcgagcactccaagatcaacttccgcgacaagcgcagcgccctgcagtccatcaatgagtgggccgcacagaccaccgatggcaagctgcctgaggtcaccaaggacgtggagcggacggatggcgcgctgctggtcaacgccatgttcttcaagccgcactgggacgagaagttccaccacaagatggtggacaaccgaggcttcatggtgacccgctcgtataccgttggggttacgatgatgcaccgcacaggactctacaactactacgacgacgagaaggagaagctgcagatggtggagatgcccctggcccacaagctgtccagcctcctcatcctcatgccgcaccacgtggagcccctggagcgcctggagaagcttctgaccaaggagcagctgaagatctggatggggaagatgcagaagaaagccgtcgccatctccttgcccaagggggtggtagaggtgacccacgacctgcagaaacacctggctggactgggtctgactgaggccatcgacaagaacaaggcagacctgtcacgcatgtcaggcaagaaggacctgtacctggccagcgtgttccacgctaccgccttcgagtgggacacagagggcaacccctttgaccaggacatctacgggcgtgaggagctgcgcagtcccaagytcttctacgctgaccaccccttcattttcctggttcgagacacccagaccggctccctgctgttcattgggcgcctggtccggcccaagggtgacaagatgcgagatgagctgtagggccccagggatggcaggaggcagcccaaggctcctgagacacatgggtgctatggggggtagctgaggtaccgaccttggatgtgccatggggtgggggtgggaaaacagagcaggcttcctggatgtctgagcagatcttcccaggcagaattgactctgtctggatgtgggcccccagataccgtgatgctgagcccggacacsccacattctgrggrccctgggggcagttggcgtgtcttgccttcagcatcctgggattnaagcctgccttcaatcagtgttcatatttatagccaagtgctttctcatctgtgagacagaatcgagctarggggcttcagcccagccctgtggaatggggaccgtcttttccttaccctaccatcacctcagccctaa

SEQ ID NO: 324 - DNA, 2325 bp, Homo sapiens
aagaaatgcagatgagtgtaaaacatctgttctcaattatgttgatctgtgtgcgcagtactggagcatttacccattcatgttgagcctcaaatgcttgttttctggggtccacaaaagacagttttatacattttgagttgttcataaagtttgtcttgtgatagtcctggcacttaaagacaaatttttctggtagtaaaagttcagatttattactatgtcatgaaacacagtacattcaaatcaaacggcagttttctttctaagtaaatgatttccagtcatctaaaaggtgggcaagatgagataaagacattttgatacagtaattgttttggttgggttttcatgtcagtttatgtttgactaaagctctcttcatatgcaggtttataaatttgttaggtctgttgtcccatgattaaacatgsagtgcctcctctctgatttaatattctgcaggtcattgtaacctgctaggcaaagtcacaacattgcattaaagaggtgatagctttgctaatatcactgttttaaaggacgtacagttaaaggaatattaagtgggagaaagcctacaaggcttttagaatattatcagtatcttcatttctggtattcagatgttatgtgataaaacacattttttttggctttcccagatacactatatatttgttcaagggtaaatctataaaatgtatatactttattttgtggttttgctatttataaatttaatgttttaactgttgctcatttatggtttgttttgggtggtggtgttcatctgtatatcaccatgttaatttgtaatggaagtgcacttcgtagtgtatattgttactgacattaaaatactttatagcattgtctctgagcaaaagctagtatttaattgtacaaatgaataagcaagttacatgttattgtttgctcttgacagggtaggcctcttaaaagaaaaaaaacaacttgttttttctttatgaatcccctatgccaaacacataccttccatgcatgacatgagatctgcaaactggattttagccaccgtatttatttagtcaaaaaaattgtccattgtagcagacccgaaaacctttttgctgtgacatgaaaccatgttattcttatcttcttaaaacacagcctgggatggaatggccatggcatttttttcagagaacatcctttatctgctatgactgaatccttaggaaatgtaagctataaccctttgattttcaagaactaccgaataagtgtatgaagaggtggttttttaaaacttcaagttggaatttttatgaggtcactgtgtaatttgaagaattgtgtgagattgtcatgatataaattccttttaaggactgataaatagaatgaaaagtttccaggtagtttaaaactccacaggtcagtttccttttcattcctgcttcactgtggtttataagcctacgggagagcaccgttgctcagatgctactgtgagcttcctgtccggtgttagaaagtaactagttaaaagttcattttagaatgtatggtttttggggatgaactaagaattagttattagttccaaaggactgagaaccaattttaatattttcacatttataggaaagaaattcatatgtccctgaaacttctaggacaaaaccaaacaagtaaggagggaactgttgcaaagccatttcatcgagaaggggacagaaggagaaatacacacatgtatacacaaacagaatggttgagaaaacgttttaataaaatgtgagggttgtatgtgtgcgtgtatatatttacacttaacctctaaaattctcttctacagtatctctgttatgaatatgatggaaaagcaacattttggtggtgagactattgttaaaataaatttgagaaagacgaaaattttgtgagtcttgataattacaagtcaacagctatcgaaagttagcacagcttgtctgtggtgctgtttttttccccactgcagtggacttatgctgttttcatgtttagaaacaaaaaggtttcatgtgattcatgtgtaagatgcacagtatttgacatcctgattatgtaatccctattccatctatccagtcttacacttatggttggcctcaaatctattgcatttatgataatgtattatatctagttgagtttaatatttttttattagcctgtaaataaagatggcatcttctacattaaaatgatattgatctcatttttttaaataaacattttgtttccttgacgttaaaaaaaaaaaaaaaaaaaaaaaaaaaaaaaaaaaaa

SEQ ID NO: 325 - DNA, 785 bp, Homo sapiens
  misc_feature (6): n equals a,t,g, or c
ggcctncggcaaagaagcatagccacggggccamagccaggtgtgtccttgcagttggaacccaggagttccggaagccaaagcccccccacgagggtcccgcgaagacctggtggcggaggagagcccggagctgctgaaccctgagcccaggagactgagcccagagttgaggctactgccctatatgatcactctgggcgacgccgtgcacaacttcgccgacgggctggccgtgggcgccgccttcgcgtcctcctggaagaccgggctggccacctcgctggccgtgttctgccacgagttgccacacgagctgggggacttcgccgccttgctgcacgcggggctgtccgtgcgccaagcactgctgctgaacctggcctccgcgctcacggccttcgctggtctctacgtggcactcgcggttggagtcagcgaggagagcgaggcctggatcctggcagtggccaccggcctgttcctctacgtagcactctgcgacatgctcccggcgatgttgaaagtacgggacccgcggccctggctcctcttcctgctgcacaacgtgggcctgctgggcggctggaccgtcctgctgctgctgtccctgtacgaggatgacatcaccttctgataccctgccctagtcccccacctttgacttaagatcccacacctcacaaacctacagcccagaaaccagaagcccctatagaggccccagtcccaactccagtaaagacactcttgtccttggaaaaaaaaaaaaaaaaaaaaaaaaa

SEQ ID NO: 326 - DNA, 244 bp, Homo sapiens
  misc_feature (244): n equals a,t,g, or c
aatcactaaaggaaaaayagtagcctgcagtaccggtccggaattcccgggtcgacccacgcgtccgacgacagaagggtacggctgcgagaagacgacagaagggtacggctgcgagaagacgacagaagggtacggctgcgagaagackacagaagggtacggctgcgagaagackacagaagggtacggctgcgagaagacgacagaaggtacggctgcgagaagacgacagagggtacgn

SEQ ID NO: 327 - DNA, 2454 bp, Homo sapiens
gctgcggcggggtctggggcgcagagcagcggcgggaggaggcggacacgtggcaacagcggtacagcccgggcggcggcacaacagcggcggcggcatcggcccgagcgccggccgccctcccaccctcccgccccgcggcagccctagctccctccacttggctcccctggtcccgctcgctcggccgggagctgctctgtgcttttctctctgattctccagcgacaggacccggcgccggcactgagcaccgccaccatggggaagggggttggacgtgataagtatgagcctgcagctgtttcagaacaaggtgataaaaagggcaaaaagggcaaaaaagacagggacatggatgaactgaagaaagaagtttctatggatgatcataaacttagccttgatgaacttcatcgtaaatatggaacagacttgagccggggattaacatctgctcgtgcagctgagatcctggcgcgagatggtcccaacgccctcactccccctcccactactcctgaatggatcaagttttgtcggcagctctttggggggttctcaatgttactgtggattggagcgattctttgtttcttggcttatagcatccaagctgctacagaagaggaacctcaaaacgataatctgtacctgggtgtggtgctatcagccgttgtaatcataactggttgcttctcctactatcaagaagctaaaagttcaaagatcatggaatccttcaaaaacatggtccctcagcaagcccttgtgattcgaaatggtgagaaaatgagcataaatgcggaggaagttgtggttggggatctggtggaagtaaaaggaggagaccgaattcctgctgacctcagaatcatatctgcaaatggctgcaaggtggataactcctcgctcactggtgaatcagaaccccagactaggtctccagatttcacaaatgaaaaccccctggagacgaggaacattgccttcttttcaaccaattgtgttgaaggcaccgcacgtggtattgttgtctacactggggatcgcactgtgatgggaagaattgccacacttgcttctgggctggaaggaggccagacccccattgctgcagaaattgaacattttatccacatcatcacgggtgtggctgtgttcctgggtgtgtctttcttcatcctttctctcatccttgagtacacctggcttgaggctgtcatcttcctcatcggtatcatcgtagccaatgtgccggaaggtttgctggccactgtcacggtctgtctgacacttactgccaaacgcatggcaaggaaaaactgcttagtgaagaacttagaagctgtggagaccttggggtccacgtccaccatctgctctgataaaactggaactctgactcagaaccggatgacagtggcccacatgtggtttgacaatcaaatccatgaagctgatacgacagagaatcagagtggtgtctcttttgacaagacttcagctacctggcttgctctgtccagaattgcaggtctttgtaacagggcagtgtttcaggctaaccaggaaaacctacctattcttaagcgggcagttgcaggagatgcctctgagtcagcactcttaaagtgcatagagctgtgctgtggttccgtgaaggagatgagagaaagatacgccaaaatcgtcgagatacccttcaactccaccaacaagtaccagttgtctattcataagaaccccaacacatcggagccccaacacctgttggtgatgaagggcgccccagaaaggatcctagaccgttgcagctctatcctcctccacggcaaggagcagcccctggatgaggagctgaaagacgcctttcagaacgcctatttggagctggggggcctcggagaacgagtcctaggtttctgccacctctttctgccagatgaacagtttcctgaagggttccagtttgacactgacgatgtgaatttccctatcgataatctgtgctttgttgggctcatctccatgattgaccctccacgggcggccgttcctgatgccgtgggcaaatgtcgaagtgctggaattaaggtcatcatggtcacaggagaccatccaatcacagctaaagctattgccaaaggtgtgggcatcatctcagaaggcaatgagaccgtggaagacattgctgcccgcctcaacatcccagtcagccaggtgaaccccagggatgccaaggcctgcgtagtacacggcagtgatctaaaggacatgacctccgagcagctggatgacattttgaagtaccacactgagatagtgtttgccaagacctcccctcagcagaagctcatcattgtggaaaggctgccaaagacagggtgctatcgtgggctgtgactggtgacggtgtgaatgactctccagctttgaagaaagccagacatt

SEQ ID NO: 328 - DNA, 505 bp, Homo sapiens
  misc_feature (10): n equals a,t,g, or c
  misc_feature (15): n equals a,t,g, or c
  misc_feature (182): n equals a,t,g, or c
  misc_feature (189): n equals a,t,g, or c
  misc_feature (246): n equals a,t,g, or c
  misc_feature (300): n equals a,t,g, or c
  misc_feature (302): n equals a,t,g, or c
  misc_feature (332): n equals a,t,g, or c
  misc_feature (335): n equals a,t,g, or c
  misc_feature (339): n equals a,t,g, or c
  misc_feature (342): n equals a,t,g, or c
  misc_feature (367): n equals a,t,g, or c
  misc_feature (394): n equals a,t,g, or c
  misc_feature (401): n equals a,t,g, or c
  misc_feature (405): n equals a,t,g, or c
  misc_feature (407): n equals a,t,g, or c
  misc_feature (411): n equals a,t,g, or c
  misc_feature (419): n equals a,t,g, or c
  misc_feature (420): n equals a,t,g, or c
  misc_feature (422): n equals a,t,g, or c
  misc_feature (424): n equals a,t,g, or c
  misc_feature (436): n equals a,t,g, or c
  misc_feature (440): n equals a,t,g, or c
  misc_feature (451): n equals a,t,g, or c
  misc_feature (452): n equals a,t,g, or c
  misc_feature (454): n equals a,t,g, or c
  misc_feature (459): n equals a,t,g, or c
  misc_feature (467): n equals a,t,g, or c
  misc_feature (469): n equals a,t,g, or c
  misc_feature (470): n equals a,t,g, or c
  misc_feature (472): n equals a,t,g, or c
  misc_feature (474): n equals a,t,g, or c
  misc_feature (475): n equals a,t,g, or c
  misc_feature (477): n equals a,t,g, or c
  misc_feature (479): n equals a,t,g, or c
  misc_feature (482): n equals a,t,g, or c
  misc_feature (483): n equals a,t,g, or c
  misc_feature (485): n equals a,t,g, or c
  misc_feature (488): n equals a,t,g, or c
  misc_feature (490): n equals a,t,g, or c
  misc_feature (491): n equals a,t,g, or c
aattcggcanagggnagtgcgaagtagtgggtgacttttgttctctttctggcagaactttgcctacacattcctactacccctgggaattctaactcagatgtgggtagcagcttcctcaaagagaaactttttcccagctgggtgctgtggctcacacctgtgaatcccagccctttggnaggctgnagtgggcagatcgcttgagcccaggagtttgagatcagcctgggcaacatggtgaantccatctctgtgaaaaatacaaaaattagccaggtgtggtggtgcgcgcctgtnantcccagctactagggaggctgaaggtgggnggnttgnttnagcccaggaggttgaggctgcattnggctgggattcaaaccatgttactccntgaccangtgngncctntttcaaannangnaagggaaggggnaagnaaaggaaaagnngnagggngatgccgntnntngnntngnagnngnatnanntaaaaatttggggg

SEQ ID NO: 329 - DNA, 559 bp, Homo sapiens
  misc_feature (1): n equals a,t,g, or c
  misc_feature (2): n equals a,t,g, or c
  misc_feature (4): n equals a,t,g, or c
  misc_feature (6): n equals a,t,g, or c
  misc_feature (335): n equals a,t,g, or c
  misc_feature (343): n equals a,t,g, or c
  misc_feature (373): n equals a,t,g, or c
  misc_feature (385): n equals a,t,g, or c
  misc_feature (387): n equals a,t,g, or c
  misc_feature (441): n equals a,t,g, or c
  misc_feature (445): n equals a,t,g, or c
  misc_feature (448): n equals a,t,g, or c
  misc_feature (457): n equals a,t,g, or c
  misc_feature (473): n equals a,t,g, or c
  misc_feature (487): n equals a,t,g, or c
  misc_feature (503): n equals a,t,g, or c
  misc_feature (505): n equals a,t,g, or c
  misc_feature (551): n equals a,t,g, or c
  misc_feature (553): n equals a,t,g, or c
nnanancctgggaggcagagtttgcagtgagccgagatggcgccactgcactccagcctgggggacagagcgagactccatctcaaaaaaaaaaaaaaaaaaaattaaaaattaagttctttagttgcactagccatatttcaaatacttgatggatacatgtggctagtggctaacataagggatagcacagatataaaacatttcctcccaaagtgctgggattacaggcatgagccaccgcgcccggcctatcatatgaattttgagggaacacaatcatgcagtctgtagcagatggtaataggctgatatattacacttgttgatgtaanctggatangtttctttcttctccaaggacagctttttnaatatttaacantnccattaatttttcagtttccgggagaattttataatttaaaattgccgacttangganaanccaattggnccaaccattacaatanatttttaattccgnttaaaaaatcccaccngngggggaattccgcttaaaattttattttccattattcccaatggcntnaattta

SEQ ID NO: 330 - DNA, 467 bp, Homo sapiens
  misc_feature (4): n equals a,t,g, or c
  misc_feature (99): n equals a,t,g, or c
  misc_feature (125): n equals a,t,g, or c
  misc_feature (135): n equals a,t,g, or c
  misc_feature (138): n equals a,t,g, or c
  misc_feature (145): n equals a,t,g, or c
  misc_feature (256): n equals a,t,g, or c
  misc_feature (263): n equals a,t,g, or c
  misc_feature (275): n equals a,t,g, or c
  misc_feature (298): n equals a,t,g, or c
  misc_feature (305): n equals a,t,g, or c
  misc_feature (330): n equals a,t,g, or c
  misc_feature (341): n equals a,t,g, or c
  misc_feature (344): n equals a,t,g, or c
  misc_feature (391): n equals a,t,g, or c
  misc_feature (393): n equals a,t,g, or c
  misc_feature (398): n equals a,t,g, or c
  misc_feature (402): n equals a,t,g, or c
  misc_feature (422): n equals a,t,g, or c
  misc_feature (428): n equals a,t,g, or c
  misc_feature (440): n equals a,t,g, or c
  misc_feature (441): n equals a,t,g, or c
  misc_feature (453): n equals a,t,g, or c
  misc_feature (456): n equals a,t,g, or c
  misc_feature (458): n equals a,t,g, or c
aatnatgctctgcgtgatgatgttgccgctggtcgtcgtcggttgcacatcaaagcagtctgtcagtcagtgcgtgaagccaccaccgcctccggtggnatgaatgcagcctccccccgactggncagacaccgntgnaacgggnattatttcaccctcagagagaggctgatcactatgcaaaaacaactgggaggaaacccagaagtatattgaatgagcagtgcagattagagttgcccatatcgatgggcancaattgncaattattgtgnagcaatacacacggggtttccangggagtnttaaatgccttaaagtaattaaaanccggggcaatnccnttttacggatgttttgctggggtttccgtttttaaccaacatttttntnggggnccgnccacaaattttggggttggnattggncgttttttcttnntggccccatttnccngnaaacggggg

SEQ ID NO: 331 - DNA, 418 bp, Homo sapiens
  misc_feature (22): n equals a,t,g, or c
  misc_feature (37): n equals a,t,g, or c
  misc_feature (126): n equals a,t,g, or c
  misc_feature (131): n equals a,t,g, or c
  misc_feature (196): n equals a,t,g, or c
  misc_feature (202): n equals a,t,g, or c
  misc_feature (250): n equals a,t,g, or c
  misc_feature (257): n equals a,t,g, or c
  misc_feature (284): n equals a,t,g, or c
  misc_feature (298): n equals a,t,g, or c
  misc_feature (338): n equals a,t,g, or c
  misc_feature (344): n equals a,t,g, or c
  misc_feature (353): n equals a,t,g, or c
  misc_feature (380): n equals a,t,g, or c
  misc_feature (387): n equals a,t,g, or c
gagctgccaacctggcaattantgtctgctaagggtnctctttattcacccttacttggacttcctttcctgtagggaatctcacgtaaaatgaaatcttccctcccccaaggtgtccgcaatgtngccantgtctgtctgcagattggctacccaactgttgcatcagtaccccattctatcatcaacgggtacnaacgantcctggccttgtctgtggagacggattacaccttcccacttgctgaanaagtcanggcttcttggctgatccatctgccttngtggctgctgcccngttggctgctgccaccacaactgctcctgctgctgctgcnccccancttaagttnaaacccaagaaaatccgaagatccganaaagatntggattgggtctctttgactaatcaccaaaa

SEQ ID NO: 332 - DNA, 486 bp, Homo sapiens
  misc_feature (9): n equals a,t,g, or c
  misc_feature (49): n equals a,t,g, or c
  misc_feature (379): n equals a,t,g, or c
  misc_feature (415): n equals a,t,g, or c
  misc_feature (446): n equals a,t,g, or c
  misc_feature (478): n equals a,t,g, or c
  misc_feature (485): n equals a,t,g, or c
  misc_feature (486): n equals a,t,g, or c
acgggaccntgggaccggcgtcgggggtcgcggggaccatgcagcgganctccctgcccttcgctatcctgacgctggtgaacgccccgtacaagcgaggattttactgcggggatgactccatccggtacccctaccgtccagataccatcacccacgggctcatggctggggtcaccatcacggccaccgtcatccttgtctcggccggggaagcctacctggtgtacacagaccggctctattctcgctcggacttcaacaactacgtggctgctgtatacaaggtgctggggacttcctgtttggggctgccgtgagccagtctctgacagacctggccaagtacatgattgggcgtctgaagcccaattctaancgtctgcgaacccgattgaaccggtcaatgctcgtnatgtgcagtggagaagtttgcagggaacctnttgattcacgagcagtgtttttaatcggaatntctttgnn

SEQ ID NO: 333 - DNA, 268 bp, Homo sapiens
  misc_feature (36): n equals a,t,g, or c
  misc_feature (69): n equals a,t,g, or c
  misc_feature (78): n equals a,t,g, or c
  misc_feature (87): n equals a,t,g, or c
  misc_feature (105): n equals a,t,g, or c
  misc_feature (108): n equals a,t,g, or c
  misc_feature (160): n equals a,t,g, or c
  misc_feature (218): n equals a,t,g, or c
  misc_feature (244): n equals a,t,g, or c
  misc_feature (260): n equals a,t,g, or c
  misc_feature (263): n equals a,t,g, or c
  misc_feature (264): n equals a,t,g, or c
cccacgctgtccgatgatttgtcacaatcttatcantaatcattactctgttttttatatttcaactanaagtatcanaatatagcnttccagaaaaccccgaancanagtcactgactacatcaaagtctactacaccttgagaaaacaaatgaacganaatctattttcctcattcattaccccaacaataataggactccctatcgtaattattntcactatgtttccaagcattgatatncccatcacctacccgnctnntcaa

SEQ ID NO: 334 - DNA, 517 bp, Homo sapiens
  misc_feature (214): n equals a,t,g, or c
  misc_feature (259): n equals a,t,g, or c
  misc_feature (302): n equals a,t,g, or c
  misc_feature (332): n equals a,t,g, or c
  misc_feature (360): n equals a,t,g, or c
  misc_feature (410): n equals a,t,g, or c
  misc_feature (436): n equals a,t,g, or c
  misc_feature (447): n equals a,t,g, or c
  misc_feature (463): n equals a,t,g, or c
  misc_feature (489): n equals a,t,g, or c
  misc_feature (496): n equals a,t,g, or c
cggaaaggagcgcctactaaggacgccgtcgaggtccggggcgcctcaactctatagctctaactggctagaagtgcccaacgtggaatgtttcttttttaaaggcggctcttgaagcgacccggaagcggaagtggaagaaagttctagtggcttgagattaagcctgatcaagatgacaacctcccaaaagcaccgagacttcgtggcagancccatgggggagaaccagtggggaacctggctgggattggtgaantcctgggcaagaaactggaagaaagggttttgacaaggctatnttgtcttggccatttctggtgctaaaaaanataaaaactctcccggaatggtgaaaanctttttgggccacccaacatcccgaatgtccgatgctccaaaatgtgcancctcttttatgtctttggaatctctnccccccccccnatttgaccaattggancccccttcctcaagaaaatgttgttncccccanttccggttttgatttccccac

SEQ ID NO: 335 - DNA, 297 bp, Homo sapiens
  misc_feature (19): n equals a,t,g, or c
  misc_feature (155): n equals a,t,g, or c
  misc_feature (156): n equals a,t,g, or c
  misc_feature (164): n equals a,t,g, or c
  misc_feature (166): n equals a,t,g, or c
  misc_feature (167): n equals a,t,g, or c
  misc_feature (171): n equals a,t,g, or c
  misc_feature (201): n equals a,t,g, or c
  misc_feature (224): n equals a,t,g, or c
  misc_feature (226): n equals a,t,g, or c
  misc_feature (244): n equals a,t,g, or c
  misc_feature (245): n equals a,t,g, or c
  misc_feature (246): n equals a,t,g, or c
  misc_feature (252): n equals a,t,g, or c
  misc_feature (265): n equals a,t,g, or c
  misc_feature (267): n equals a,t,g, or c
  misc_feature (286): n equals a,t,g, or c
ctccgcaaattgaaccctncactcaaagggaaacaaaagctggagctccaccgcggtgacggccgctctagaactagtggggggcccggtacccaattcgccctatagtgagtcgtattacaattcactggccgtcgttttacaacgtcgtgacnnggaaaacntnnaatncttccggctcgtatgttgtgtggaattgtnagcggataacaattcacacaggnancagctataaccatgattnnnccaagntcgaaattaaccntnactaaaggggacaaaagtnggggctccacg

SEQ ID NO: 336 - DNA, 386 bp, Homo sapiens
  misc_feature (50): n equals a,t,g, or c
  misc_feature (128): n equals a,t,g, or c
  misc_feature (148): n equals a,t,g, or c
  misc_feature (185): n equals a,t,g, or c
  misc_feature (187): n equals a,t,g, or c
  misc_feature (200): n equals a,t,g, or c
  misc_feature (204): n equals a,t,g, or c
  misc_feature (244): n equals a,t,g, or c
  misc_feature (251): n equals a,t,g, or c
  misc_feature (261): n equals a,t,g, or c
  misc_feature (265): n equals a,t,g, or c
  misc_feature (272): n equals a,t,g, or c
  misc_feature (275): n equals a,t,g, or c
  misc_feature (286): n equals a,t,g, or c
  misc_feature (302): n equals a,t,g, or c
  misc_feature (304): n equals a,t,g, or c
  misc_feature (314): n equals a,t,g, or c
  misc_feature (315): n equals a,t,g, or c
  misc_feature (322): n equals a,t,g, or c
  misc_feature (328): n equals a,t,g, or c
  misc_feature (337): n equals a,t,g, or c
  misc_feature (344): n equals a,t,g, or c
  misc_feature (346): n equals a,t,g, or c
  misc_feature (359): n equals a,t,g, or c
  misc_feature (363): n equals a,t,g, or c
  misc_feature (365): n equals a,t,g, or c
  misc_feature (380): n equals a,t,g, or c
gatgggcagcgactacatccgtgaggtgaatgtggtgaagtctgcccgtntcggttattccaaaatgctgctgggtgtttatgcctactttatagagcataagcagcgcaacacccttatctggttgncgacggatggtgatgcccgngaactttatgaaaaacccacgttgagcccgactattngngatattccgtcgntgcntggggctggccccgtggtatggcaaaaaagcaccgggttnaacaagntcaaccatgnaagngtttcanctnaatgggggggnccccgtaacccaattngncctataagtnnatgggantttaanaattcaatnggccctngnttttaaatggtgngtgntnggccttttttttttngtttgt

SEQ ID NO: 337 - DNA, 506 bp, Homo sapiens
  misc_feature (13): n equals a,t,g, or c
  misc_feature (307): n equals a,t,g, or c
  misc_feature (340): n equals a,t,g, or c
  misc_feature (360): n equals a,t,g, or c
  misc_feature (404): n equals a,t,g, or c
  misc_feature (412): n equals a,t,g, or c
  misc_feature (414): n equals a,t,g, or c
  misc_feature (437): n equals a,t,g, or c
  misc_feature (439): n equals a,t,g, or c
  misc_feature (469): n equals a,t,g, or c
  misc_feature (470): n equals a,t,g, or c
  misc_feature (471): n equals a,t,g, or c
  misc_feature (472): n equals a,t,g, or c
  misc_feature (481): n equals a,t,g, or c
  misc_feature (483): n equals a,t,g, or c
  misc_feature (501): n equals a,t,g, or c
aattcggcagagnattgacatcaggaaggacctctatgctaacaatgtcctatcagggggcaccactatgtaccctggcattgccgaccgaatgcagaaggagatcacggccctagcacccagcaccatgaagatcaagatcattgcccctccggaggcgcaaatactctgtctggatcggtggctccatcctggcctctctgtccaccttccagcagatgtggatcagcaaacagggaatacggtgaagccgggccttccattgtccaccgcaaatgctttcttaaaacacttttcctggttcctnttctgtcttttaggcacacaactgtggaatgtncctgtgggaatttatggccntttcagtttctttttccaaatcattcctagggccaaagttttgnattggttnanccatggggtttttttaaataaantntggaaatagggttaattggttaaaaaaaannnnaaaaaaaantntggggggggggggcccgntaccc

SEQ ID NO: 338 - DNA, 623 bp, Homo sapiens
  misc_feature (441): n equals a,t,g, or c
  misc_feature (508): n equals a,t,g, or c
  misc_feature (509): n equals a,t,g, or c
  misc_feature (513): n equals a,t,g, or c
  misc_feature (537): n equals a,t,g, or c
  misc_feature (565): n equals a,t,g, or c
  misc_feature (597): n equals a,t,g, or c
  misc_feature (599): n equals a,t,g, or c
  misc_feature (612): n equals a,t,g, or c
gcggaacttgctactaccagcaccatgccctaccaatatccagcactgaccccggagcagaagaaggagctgtctgacatcgctcaccgcatcgtggcacctggcaagggcatcctggctgcagatgagtccactgggagcattgccaagcggctgcagtccattggcaccgagaacaccgaggagaaccggcgcttctaccgccagctgctgctgacagctgacgaccgcgtgaacccctgcattgggggtgtcatcctcttccatgagacactctaccagaaggcggatgatgggcgtcccttcccccaagttatcaaatccaagggcggtgttgtgggcatcaaggtagacaagggcgtggtccccctggcagggacaaatggcgagactaccacccaagggttggatgggctgtctgagcgctgtgcccagtacaangaaggacggagctgacttcggccaagtggcgttgtgtgcttaagaatgggggaacacaccccctcanncctnggcatcatggaaaatgccaattgntctggccccgtatgccagtatctggcancagaatgcattgggccattcggggagtctgananctcctgatgggancatgacttgaa

SEQ ID NO: 339 - DNA, 344 bp, Homo sapiens
  misc_feature (88): n equals a,t,g, or c
  misc_feature (157): n equals a,t,g, or c
  misc_feature (171): n equals a,t,g, or c
  misc_feature (210): n equals a,t,g, or c
  misc_feature (298): n equals a,t,g, or c
  misc_feature (317): n equals a,t,g, or c
  misc_feature (330): n equals a,t,g, or c
  misc_feature (343): n equals a,t,g, or c
  misc_feature (344): n equals a,t,g, or c
tcgacccacgcgtccgcttcaacatgatttgtcacaatcttatcaataatcattactctgttttttatatttcaactaaaagtatcanaatatagctttccagaaaaccccgaaccaaagtcactgactacatcaaagtctactacaccttggaganaacaaatgaacganaatctattttcctcattcattaccccaacaataataggnctccctatcgtaattattatcactatgtttccaagcattatattcccatcacctacccgactaatcaataatcgactcatctccattncaacaatggattagtgcantgaacatgcaaangcaaggattatcnn

SEQ ID NO: 340 - DNA, 345 bp, Homo sapiens
  misc_feature (6): n equals a,t,g, or c
  misc_feature (13): n equals a,t,g, or c
  misc_feature (31): n equals a,t,g, or c
  misc_feature (88): n equals a,t,g, or c
  misc_feature (90): n equals a,t,g, or c
  misc_feature (128): n equals a,t,g, or c
  misc_feature (135): n equals a,t,g, or c
  misc_feature (138): n equals a,t,g, or c
  misc_feature (146): n equals a,t,g, or c
  misc_feature (153): n equals a,t,g, or c
  misc_feature (172): n equals a,t,g, or c
  misc_feature (173): n equals a,t,g, or c
  misc_feature (296): n equals a,t,g, or c
  misc_feature (313): n equals a,t,g, or c
  misc_feature (339): n equals a,t,g, or c
  misc_feature (343): n equals a,t,g, or c
  misc_feature (345): n equals a,t,g, or c
agacangctctantacgactcactatagggnaaagctggtacgcctgcaggtaccggtccggaattcccgggtcgacccacgcgtccngnaggaggggacagctgcgggcgcggggagggggcgccgngccgcgnggngccatggnggacagnagagccgggagtccgaganncgggcccgcagcccgagatgtcgccgccatggcttcgccgcagctctgccgcgcgctggtgtcggcgcaatgggtggcggaagcgctgcgggccccgcgcgctggggcagcctctgcagctgntaggacgcctcctggtnacctggccggaagctggggggcgcgnacgncn

SEQ ID NO: 341 - DNA, 170 bp, Homo sapiens
  misc_feature (20): n equals a,t,g, or c
  misc_feature (23): n equals a,t,g, or c
  misc_feature (43): n equals a,t,g, or c
  misc_feature (86): n equals a,t,g, or c
  misc_feature (160): n equals a,t,g, or c
  misc_feature (163): n equals a,t,g, or c
  misc_feature (164): n equals a,t,g, or c
  misc_feature (170): n equals a,t,g, or c
acccacgcgtccgcccacgntcncgactagttctagatcgcgnacggccgctctagaggatccaagcttacttggacatgcatgcnacgtcatagctcttctatagtgtcacctaaattcaattcactggccgtcgttttacaacgtcgtgactgggaanatnntaaaan

SEQ ID NO: 342 - DNA, 387 bp, Homo sapiens
  misc_feature (238): n equals a,t,g, or c
  misc_feature (273): n equals a,t,g, or c
  misc_feature (328): n equals a,t,g, or c
  misc_feature (337): n equals a,t,g, or c
  misc_feature (351): n equals a,t,g, or c
  misc_feature (366): n equals a,t,g, or c
  misc_feature (384): n equals a,t,g, or c
aatgacttggttgagtactcaccagtcacagaaaagcatcttacggatggcatgacagtaagagaattatgcagtgctgccataaccatgagtgataacactgcggccaacttacttctgacaacgatcggaggaccgaaggagctaaccgcttttttgcacaacatgggggatcatgtaactcgccttgatcgttgggaaccggagctgaatgaagccataccaaacgacgagcgtnacaccacgatgcctgtagcaatggcaacaacgttngcaaactattaactggcggactacttactctagcttcccggcaacaatttatagncttggtggnggcgggtaaagttncaaggcccatttttnggtttggccttccggttngtt

SEQ ID NO: 343 - DNA, 186 bp, Homo sapiens
  misc_feature (26): n equals a,t,g, or c
  misc_feature (64): n equals a,t,g, or c
  misc_feature (71): n equals a,t,g, or c
  misc_feature (109): n equals a,t,g, or c
  misc_feature (152): n equals a,t,g, or c
  misc_feature (153): n equals a,t,g, or c
  misc_feature (160): n equals a,t,g, or c
  misc_feature (183): n equals a,t,g, or c
gctgcaggaaattaacagagtctacnaggaaatgtacaagactgatctggagaaagacattatntcggacncatctggtgacttccgcaagctgatggttgccctggcnaaaggttaaaaaacagaagaatggtccgtccttgaatatgaanngaatganccacatgcccggatttccttganccc

SEQ ID NO: 344 - DNA, 611 bp, Homo sapiens
  misc_feature (8): n equals a,t,g, or c
  misc_feature (11): n equals a,t,g, or c
  misc_feature (285): n equals a,t,g, or c
tgcaaggnganactaccctcactaaagggaacaaaagctggagctccaccgcggtgcggccgctctagaactagtggatcccccgggctgcaggaattcggcacgagctgcgttgggctccgggaagccgttcgggctggggctgtcggccgcggggcggaggcactcgcgcgggggatggcccactgcgtgaccttggttcagctgtccatttcctgtgaccatctcattgacaaggacatcggctccaagtctgacccactctgcgtccttttacaggatgtnggagggggcagctgggctgagcttggccggactgaacgggtgcggaactgctcaagccctgagttctccaagactctacagcttgagtaccgctttgagacagtccagaagctacgctttggaatctatgacatagacaacaagacgccagagctgagggatgatgacttcctagggggtgctgagtgttccctaggacagattgtgtccagccaggtactgactctccccttgatgctgaagctggaaaacctgctgggcgggggaccatcacggtctcagctcaggaattaaaggacaatcgtgtagtaaccatggaggtagag

SEQ ID NO: 345 - DNA, 344 bp, Homo sapiens
  misc_feature (289): n equals a,t,g, or c
  misc_feature (296): n equals a,t,g, or c
  misc_feature (329): n equals a,t,g, or c
  misc_feature (331): n equals a,t,g, or c
  misc_feature (342): n equals a,t,g, or c
tttccttctacagtattcctgaatttgacgaatggaaaaaacatatagaaaaccagaaagcctggaaaataaagtactataaaggattgggtactagtacagctaaagaagcaaaggaatattttgctgatatggaaaggcatcgcatcttgtttagatatgctggtcctgaagatgatgctgccattaccttggcatttagtaagaagaagattgatgacagaaaagaatggttaacaaattttatggaagaccggagacagcgtagctacatggcttaccagaggantgattcnctctcaactcagacatgaaagatctataccacncntgttgatggcntt

SEQ ID NO: 346 - DNA, 506 bp, Homo sapiens
  misc_feature (392): n equals a,t,g, or c
  misc_feature (452): n equals a,t,g, or c
  misc_feature (453): n equals a,t,g, or c
  misc_feature (472): n equals a,t,g, or c
  misc_feature (480): n equals a,t,g, or c
  misc_feature (495): n equals a,t,g, or c
ggaaaagcccaaggaaaaagcaaagaatagcaaaaaaaagggggccaagaaggaagtggttgggattggtcttcttttttcttcagtgagttttttccccaacaggttctgatggtcctttggctaccagcaaaccagtccctgcagaaaagtcaggtcttccagtgggtcctgagaacggagtagaactttccaaagaggagctgatccgcaggaagcgcgaggagttcattcagaagcatgggaggggtatggagaagtccaacaagtccacgaagtcagatgctccaaaggagaagggcaaaaaagcaccccgggtgtgggaactgggtggctgtgctaacaaagaaatgttggattacagtacttccaccaccaatggaacccctgangcttgccttgtctgaggacattaaccttgattccaagggactgggtctggggggcacttnnggatctggactgcacactntgatgacnaagggcttgttaaantttccaaacta

SEQ ID NO: 347 - DNA, 444 bp, Homo sapiens
  misc_feature (289): n equals a,t,g, or c
cggaagggagaccatgttccgagcggcggctccggggcagctccggcgggcggcctcattgctacgatttcagagtaccctggtaatagctgagcatgcaaatgattccctagcacccattactttaaataccattactgcagccacacgccttggaggtgaagtgtcctgcttagtagctggaaccaaatgtgacaaggtggcacaagatctctgtaaagtagcaggcatagcaaaagttctggtggctcagcatgatgtgtacaaaggcctacttccagaggaactnacaccattgattttggcaactcagaagcagttcaattacacacacatctgtgctggagcatctgccttcggaaagaaccttttgcccagagtagcagccaaacttgaggttgccccgatttctgacatcattgcaatcaagtcacctgacacatt

SEQ ID NO: 348 - DNA, 358 bp, Homo sapiens
  misc_feature (19): n equals a,t,g, or c
  misc_feature (52): n equals a,t,g, or c
  misc_feature (187): n equals a,t,g, or c
  misc_feature (280): n equals a,t,g, or c
  misc_feature (295): n equals a,t,g, or c
  misc_feature (301): n equals a,t,g, or c
  misc_feature (317): n equals a,t,g, or c
  misc_feature (348): n equals a,t,g, or c
ggcagagaagcagaagcgnctcagttagagtccagcaaaaggtttgccaaanagtttatggacagacatggaatcccaaccgcacaatgggaaggctttcaccaaacctgaaaggaagcctgcagcttcattttgagtgcagacttccctgctttggttgtgaaaggccagtggtcttgcagctggnaaaaggggtgattgttgcaaagagcaaagaagaggcctgcaagctgtacaagagatcatgcaggtaggctgggtcttctggaaaaatttactnttgtattcatactgnatgaantaccgttttaagtttnaaaaatgttcctcacattaagggaaattctnttttgcaacc

SEQ ID NO: 349 - DNA, 321 bp, Homo sapiens
  misc_feature (187): n equals a,t,g, or c
  misc_feature (206): n equals a,t,g, or c
  misc_feature (240): n equals a,t,g, or c
  misc_feature (294): n equals a,t,g, or c
  misc_feature (295): n equals a,t,g, or c
  misc_feature (301): n equals a,t,g, or c
  misc_feature (316): n equals a,t,g, or c
ggcgctttgctctgtccaccaagattcctgacaccaaaggctgcttgcagtgtcgtgtggtgcggaacccctacacgggtgccaccttcctgctggccgccctgcccaccagcctgctcctgctgcagtggtatgagccgctgcagaagtttctgctgctgaagaacttctccagccctctgcccancccagctgggatgctgganccgctggtgctggatgggaaggagctgccgcagngtttttttggggccgaagggcctaaagggcccggttgccggttcctgttccaanncctgcncctgggaggttggcnttaag

SEQ ID NO: 350 - DNA, 742 bp, Homo sapiens
  misc_feature (618): n equals a,t,g, or c
  misc_feature (653): n equals a,t,g, or c
  misc_feature (658): n equals a,t,g, or c
  misc_feature (683): n equals a,t,g, or c
  misc_feature (689): n equals a,t,g, or c
  misc_feature (702): n equals a,t,g, or c
  misc_feature (707): n equals a,t,g, or c
  misc_feature (714): n equals a,t,g, or c
  misc_feature (719): n equals a,t,g, or c
  misc_feature (722): n equals a,t,g, or c
  misc_feature (734): n equals a,t,g, or c
ggtcacgctgacccagtgctcggaaaagctggtgcagctcatcctgcacgaatacaagatcttcaatgcagaagtgcttttccgagaagactgctccccggacgagttcatcgatgtgatcgtgggcaaccgggtgtacatgccctgcctgtatgtttataacaaaatcgaccagatctccatggaagaggtggaccgcctggcccgaaaacccaacagtgtggtcatcagctgcggcatgaagctgaacctggactatctgctggagatgctctgggagtacttggccctgacctgcatctacaccaagaagagaggacagaggccagacttcacagacgccatcattctccggaaaggggcctcagtggagcacgtgggcaccagcaccaagtacagtccgcagcgggtgggcctgacccacaccatggagcatgaggacgtcatccagatcgtgaagaagtaacggcgcctgccgggccttccgcccacctgctcgtctcccttgggaggtggtcccactgggacacacaaacacccaaacagaaaaatacaaatacacgtaccccaagaaggggtccctcaagtctctgctatttacagaagtttcttcagtangcagaccaaaaatgtgttgggcaaaagggctcggntggangcattttccataagactgagccctnttcatngggggttttgagnttgantgcttancctgnatntgtgcctccaancccctgac

SEQ ID NO: 351 - DNA, 272 bp, Homo sapiens
  misc_feature (167): n equals a,t,g, or c
  misc_feature (251): n equals a,t,g, or c
  misc_feature (272): n equals a,t,g, or c
aatcaggcgggactgacggcagatcgtatgctggtcctgtccagagccgggcaggcggcagggctgacgtttaaccagaccagcgagtcactcagcgcactggttaaggcgggggtaagcggtgaggctcagattgcgtccatcagccagagtgtggcgcgtttctnctctgcatccggcgtggaggtggacaaggtcgttgaagccttcgaggggggcccgtacccatttgcctatagtaagcgtattanaataattgccgtgttttaaan

SEQ ID NO: 352 - DNA, 256 bp, Homo sapiens
  misc_feature (170): n equals a,t,g, or c
  misc_feature (236): n equals a,t,g, or c
  misc_feature (248): n equals a,t,g, or c
  misc_feature (251): n equals a,t,g, or c
  misc_feature (252): n equals a,t,g, or c
gcagacgtccagagcagagtcagccagcatgaccgagcgccgcgtccccttctcgctcctgcggggccccagctgggaccccttccgcgactggtacccgcatagccgcctcttcgaccaggccttcgggctgccccggctgccggaggagtggtcgcagtggttaggcngcagcagctggccaggctacgtgcgccccctgccccccgccgcatcgagagccccgcagtggccgngcccgctacagncgnncgct

SEQ ID NO: 353 - DNA, 592 bp, Homo sapiens
  misc_feature (35): n equals a,t,g, or c
  misc_feature (54): n equals a,t,g, or c
  misc_feature (93): n equals a,t,g, or c
  misc_feature (277): n equals a,t,g, or c
  misc_feature (480): n equals a,t,g, or c
  misc_feature (485): n equals a,t,g, or c
  misc_feature (522): n equals a,t,g, or c
  misc_feature (545): n equals a,t,g, or c
ggttcccttccacgctgtggaagcattgtactttnggtcttcatgataaatctngctgctgctcactcgttgggtccgtgccacctttaaaanctgtaacactcaccgcgaaggtctgcaacttcactcctggggccagcaagaccacgagtgcaccgagaggaatgaacaactctggacacaccatctttaagaaccgtaatactcaccgcaagggtctgcaacttcattcttgaagtcagtgaggccaagaacccatcaattccgtacacatttnggtgactttgaagagactgtcacctatcaccaagtggtgagactattgccaagcagtgagactattgccaagtggtgagaccatcaccaagcggtgagactatcacctatcgccaagtggtcctaagtgtgaacgtgaagtccccagccctgctgctgagccagttgctgccctacatggagaacaagaagggtgctgtcatnctggnctcttccattgcagcttataatccagtagtggcgctnggtgtctacaatgtcagcaaganagagctgctggggtctcactagaacactggcattgggcttggccccc

SEQ ID NO: 354 - DNA, 539 bp, Homo sapiens
  misc_feature (4): n equals a,t,g, or c
  misc_feature (223): n equals a,t,g, or c
  misc_feature (225): n equals a,t,g, or c
cacnaaccctcactaaagggaacaaaagctggagctccaccgcggtgacggccgctctagaactagtggatcccccgggctgcaggaattcggcacgagtcgtctcaggctcgtagttcgccttcaacatgccggaaccagcgaagtccgctcccgcgcccaagaagggctcgaagaaagccgtgactaaggcgcagaagaaggacggcaagaagcgcaaggnanccgcaaggagagctactccgtatacgtgtacaaggtgctgaagcaggtccaccccgacaccggcatctcctctaaggccatgggaatcatgaactccttcgtcaacgacatcttcgaacgcatcgcgggtgaggcttcccgcctggcgcattacaacaagcgctcgaccatcacctccagggagatccagacggccgtgcgcctgctgctgcccggggagttggccaagcacgccgtgtccgagggcaccaaggccgtcaccaagtacaccagcgctaagtaaacttgccaaggagggactttctctggaattt

SEQ ID NO: 355 - DNA, 435 bp, Homo sapiens
  misc_feature (296): n equals a,t,g, or c
  misc_feature (299): n equals a,t,g, or c
  misc_feature (396): n equals a,t,g, or c
  misc_feature (419): n equals a,t,g, or c
  misc_feature (421): n equals a,t,g, or c
  misc_feature (422): n equals a,t,g, or c
  misc_feature (424): n equals a,t,g, or c
gcttcgctcacctgcccaagagtacctttgtgttggatgaatttaagcgcaagtactccaatgaggacacactctctgtggcactgccatatttctgggagcactttgataaggacggctggtccctgtggtactcagagtatcgcttccctgaagaactcactcagaccttcatgagctgcaatctcatcactggaatgttccagcgactggacaagctgaggaagaatgccttcgccagtgtcatcctttttggaaccaacaatagcagctccatttctggagtctgggtcttnccnggccaggagcttgcctttccgctgagtccagattggcaagtggactacgaagtcatacacatggcggaaactggatctggcaagcgaggagacccanacgctggttcgagagtacttttncnngngagggggcctt

SEQ ID NO: 356 - DNA, 502 bp, Homo sapiens
  misc_feature (21): n equals a,t,g, or c
  misc_feature (168): n equals a,t,g, or c
  misc_feature (239): n equals a,t,g, or c
  misc_feature (243): n equals a,t,g, or c
  misc_feature (252): n equals a,t,g, or c
  misc_feature (275): n equals a,t,g, or c
  misc_feature (288): n equals a,t,g, or c
  misc_feature (292): n equals a,t,g, or c
  misc_feature (298): n equals a,t,g, or c
  misc_feature (316): n equals a,t,g, or c
  misc_feature (317): n equals a,t,g, or c
  misc_feature (324): n equals a,t,g, or c
  misc_feature (328): n equals a,t,g, or c
  misc_feature (339): n equals a,t,g, or c
  misc_feature (348): n equals a,t,g, or c
  misc_feature (364): n equals a,t,g, or c
  misc_feature (372): n equals a,t,g, or c
  misc_feature (386): n equals a,t,g, or c
  misc_feature (390): n equals a,t,g, or c
  misc_feature (393): n equals a,t,g, or c
  misc_feature (397): n equals a,t,g, or c
  misc_feature (403): n equals a,t,g, or c
  misc_feature (413): n equals a,t,g, or c
  misc_feature (417): n equals a,t,g, or c
  misc_feature (419): n equals a,t,g, or c
  misc_feature (420): n equals a,t,g, or c
  misc_feature (425): n equals a,t,g, or c
  misc_feature (426): n equals a,t,g, or c
  misc_feature (430): n equals a,t,g, or c
  misc_feature (437): n equals a,t,g, or c
  misc_feature (440): n equals a,t,g, or c
  misc_feature (442): n equals a,t,g, or c
  misc_feature (445): n equals a,t,g, or c
  misc_feature (449): n equals a,t,g, or c
  misc_feature (452): n equals a,t,g, or c
  misc_feature (457): n equals a,t,g, or c
  misc_feature (458): n equals a,t,g, or c
  misc_feature (459): n equals a,t,g, or c
  misc_feature (461): n equals a,t,g, or c
  misc_feature (476): n equals a,t,g, or c
  misc_feature (478): n equals a,t,g, or c
  misc_feature (485): n equals a,t,g, or c
  misc_feature (497): n equals a,t,g, or c
  misc_feature (499): n equals a,t,g, or c
aattcggcacgagagggagtntgagcaaggggtgtacacctgcacagcacagggcatttggaagaatgaacagaagggagagaagattcctcggtgcttgccagtttgtgggaagcccgtgaaccccgtggaacagaggcagcgcatcatcggagggcaaaaagccanggggatagtgggggcgtttttgcagtaagggacccgaacactgatcgctgggtggccacgggcatcgtgtncctngggcatcgngtgcagcagggccttatggcttnttacaccaaagtnctcnaacttncgtggccttggatcaagnnagacctnggancaggaggactnccgccccancattcactaggttccnaatccagngagcagtttcgcanaaancanccanacacancttccccctntttngnnacccnncagngtctctnttnanatncctnctngcacnnnancccacaacccccccncnccccccncccccccccccncnccc

SEQ ID NO: 357 - DNA, 440 bp, Homo sapiens
  misc_feature (45): n equals a,t,g, or c
  misc_feature (236): n equals a,t,g, or c
  misc_feature (262): n equals a,t,g, or c
  misc_feature (293): n equals a,t,g, or c
  misc_feature (300): n equals a,t,g, or c
  misc_feature (316): n equals a,t,g, or c
  misc_feature (339): n equals a,t,g, or c
  misc_feature (360): n equals a,t,g, or c
  misc_feature (362): n equals a,t,g, or c
  misc_feature (378): n equals a,t,g, or c
  misc_feature (387): n equals a,t,g, or c
  misc_feature (389): n equals a,t,g, or c
  misc_feature (402): n equals a,t,g, or c
  misc_feature (407): n equals a,t,g, or c
  misc_feature (418): n equals a,t,g, or c
  misc_feature (426): n equals a,t,g, or c
aatatatcgaacagtcaggttaacaggctgcggcattttgtccgngccgggcttcgctcactgttcaggccggagccacagaccgccgttgaatgggcggatgctaattactatctcccgaaagaatccgcataccaggaagggcgctgggaaacactgccctttcagcgggccatcatgaatgcgaatgggcagcgactacatccgtgagtggaatgtggtgaagtttgcccgtntcggttattccaaaatgctgctgggngtttatgcctactttatagggcataagcagnggaacanccttatttggtttccncaggatggtggatgcccgagaantttttggaaaacccacgttgngncgattatttcgggganatttccggngntgttggggtttgnccccntgggttttggnaaaaaganccgggtaaaaggtt

SEQ ID NO: 358 - DNA, 234 bp, Homo sapiens
  misc_feature (16): n equals a,t,g, or c
  misc_feature (46): n equals a,t,g, or c
  misc_feature (92): n equals a,t,g, or c
  misc_feature (162): n equals a,t,g, or c
  misc_feature (166): n equals a,t,g, or c
  misc_feature (175): n equals a,t,g, or c
  misc_feature (208): n equals a,t,g, or c
  misc_feature (230): n equals a,t,g, or c
ggaaagggtgtttatncctcatggactaattatggacaggactgancgttttgctcgaaatgtgatgaaggagatgggaggccatcacattntagtcctctttttgctcaaggggggctataaattttttgctgacctgctggattacatcaaaggactgantagnaaatagtgnatagatccattcctcatgaactgtggatttttngcagatctgaagagctattgtnatga

SEQ ID NO: 359 - DNA, 668 bp, Homo sapiens
  misc_feature (15): n equals a,t,g, or c
  misc_feature (19): n equals a,t,g, or c
  misc_feature (20): n equals a,t,g, or c
  misc_feature (295): n equals a,t,g, or c
  misc_feature (512): n equals a,t,g, or c
  misc_feature (552): n equals a,t,g, or c
  misc_feature (558): n equals a,t,g, or c
  misc_feature (559): n equals a,t,g, or c
  misc_feature (579): n equals a,t,g, or c
  misc_feature (588): n equals a,t,g, or c
  misc_feature (593): n equals a,t,g, or c
  misc_feature (659): n equals a,t,g, or c
  misc_feature (667): n equals a,t,g, or c
ctgactccagtttgntatnnccatgattacgccaagctctaatacgactcactatagggaaagctggtacgcctgcaggtaccggtccggaattcccgggtcgacccacgcgtccggggtgtttgaggtacataagaaaaatgtaaggggtgaattcacttattatgaaatacaagataatacagggaagatggaagtggtggtgcatggacgactgaccacaatcaactgtgaggaaggagataaactgaaactcacctgctttgaattggcaccgaaaagtgggaataccggngagttgagatctgtaattcatagtcacatcaaggtcatcaagaccaggaaaaacaagaaagacatactcaatcctgattcaagtatggaaacttcaccagactttttcttctaaaatctggatgtcattgacgataatgtttatggagataaggtctaagtgcctaaaaaaatgtacatatacctggttgaaatacaacactatacatacacaccancatatatactagcttgttaatcctatggaaatggggtatntggagnncttttttaatttttcatagnttttttttnataanaatggcatattttggatctacaacttctatgatttgaaaaaataccttaacccttatcttttttgngaaaaaana

SEQ ID NO: 360 - DNA, 401 bp, Homo sapiens
caccattaccagcggcggcaatcctccggccttttccctgacaccggacggaaagctgaccgctaaaaatgcggatatcagtggcagtgtgaatgcgaactccgggacgctcagtaatgtgacgatagctgaaaactgtacgataaacggtacgctgagggcggaaaaaatcgtcggggacattgtaaaggcggcgagcgcggcttttccgcgccaggtggaaagcagtgtggactggccgtcaggtacccgtactgtcaccgtgaccgatgaccatccttttgatcgccagatagtggtgcttccgctgacgtttcgcggaagtaagcgtactgtcagcggcaggacaacgtattcgatgtgttatctgaaagtactgatgaacggtgcggtgatttatg

SEQ ID NO: 361 - DNA, 273 bp, Homo sapiens
  misc_feature (156): n equals a,t,g, or c
  misc_feature (189): n equals a,t,g, or c
  misc_feature (236): n equals a,t,g, or c
acccgaacacggcactggtcggcgtgcaggtggactcggagcagttcggcagccagcaggtgagccgtaattatcatctgcgcgggcgtattctgcaggtgccgtcgaactataacccgcagacgcggcaatacagcggtatctgggacggaacgnttaaaccggcatacagcaacaacatggcctggngtctgtgggatatgctgacccatccgcgctacggcatggggaaacgncttggtgcggcggatgtggataaatgggcgctgtatg

SEQ ID NO: 362 - DNA, 248 bp, Homo sapiens
  misc_feature (5): n equals a,t,g, or c
  misc_feature (37): n equals a,t,g, or c
  misc_feature (41): n equals a,t,g, or c
  misc_feature (52): n equals a,t,g, or c
  misc_feature (74): n equals a,t,g, or c
  misc_feature (145): n equals a,t,g, or c
  misc_feature (161): n equals a,t,g, or c
  misc_feature (185): n equals a,t,g, or c
  misc_feature (194): n equals a,t,g, or c
  misc_feature (210): n equals a,t,g, or c
  misc_feature (218): n equals a,t,g, or c
cgtcngtcgggcgagcgatgatgcggaaggttacctngatnttttcaaaggnaagataaccgaatcccatctcngcaaggagctgctggaaaaagtcgagctgacggaggataacgccagcagactggaggagttttcgaaagantggaaggatgccagtnataagtggaatgccatgtgggctntcaaaattnagcagaccaaagacgncaaacganttttattctgctatttagtagtaagatcag

SEQ ID NO: 363 - DNA, 149 bp, Homo sapiens
  misc_feature (131): n equals a,t,g, or c
  misc_feature (137): n equals a,t,g, or c
  misc_feature (144): n equals a,t,g, or c
  misc_feature (145): n equals a,t,g, or c
  misc_feature (147): n equals a,t,g, or c
tgccggactttcatcgtgaggatgactggtggcgtaacggccagaatctctatctggataatctggaggcgacggggctgtatcaggtgccgttgtcagcggcacagccgggcgatgtgctgctgtgctgntttggntcatcanngncg

SEQ ID NO: 364 - DNA, 352 bp, Homo sapiens
  misc_feature (4): n equals a,t,g, or c
  misc_feature (93): n equals a,t,g, or c
  misc_feature (196): n equals a,t,g, or c
  misc_feature (319): n equals a,t,g, or c
  misc_feature (322): n equals a,t,g, or c
  misc_feature (325): n equals a,t,g, or c
  misc_feature (338): n equals a,t,g, or c
  misc_feature (340): n equals a,t,g, or c
gcanaaagaaaatggcacagtaacagctgccaatgccagtacactgaatgatggagcagctgctctggttctcatgacggcagatgcagcgangaggctcaatgttacaccactggcaagaatagtagcatttgctgacgctgctgtagaacctattgattttccaattgctcctgtatatgctgcatctatggtncttaaagatgtgggattgaaaaaagaagatattgcaatgtgggaagtaaatggaagcctttagtctggttgtactagcaaacattaaaaatgttggagattggatccccaaaaagtgaatatncanggnaggagctgtttcncnggggacatccca

SEQ ID NO: 365 - DNA, 272 bp, Homo sapiens
  misc_feature (37): n equals a,t,g, or c
  misc_feature (42): n equals a,t,g, or c
  misc_feature (44): n equals a,t,g, or c
  misc_feature (47): n equals a,t,g, or c
  misc_feature (80): n equals a,t,g, or c
  misc_feature (91): n equals a,t,g, or c
  misc_feature (116): n equals a,t,g, or c
  misc_feature (132): n equals a,t,g, or c
  misc_feature (145): n equals a,t,g, or c
  misc_feature (190): n equals a,t,g, or c
  misc_feature (226): n equals a,t,g, or c
  misc_feature (242): n equals a,t,g, or c
  misc_feature (260): n equals a,t,g, or c
  misc_feature (261): n equals a,t,g, or c
aggaaaaagcccggcctcctggtggggcagtgccggncacancntgntgccctgcagaggggcttgtgccgctgctggantgacagccttncgaggctttgctgtctcggcacggnaggtctggcaaaccanggacagaccaggnacatgggaccaaagccggaacctcctgctcaacgggaagtcctancccaccaaagtgcgcctgatctgggggggctccctncccccagtcaagcggncggcggatgaactggatnnacgccccggat

SEQ ID NO: 366 - DNA, 254 bp, Homo sapiens
  misc_feature (23): n equals a,t,g, or c
  misc_feature (192): n equals a,t,g, or c
  misc_feature (208): n equals a,t,g, or c
  misc_feature (209): n equals a,t,g, or c
  misc_feature (236): n equals a,t,g, or c
  misc_feature (244): n equals a,t,g, or c
ggctctactaggactcactatanggaaagctggtacgcctgcaggtaccggtccggaattcccgggtcgacccacgcgtccgcttctctgcctagaagggataatattatcactcttcgttataataacaatcaccatcttaattaaccaccttacattagccagcataacccctatcatccttcttgtatntgcagcctgtgaagcnncactggggcttatcccttttagttatnatctcaantacatacgga

SEQ ID NO: 367 - DNA, 185 bp, Homo sapiens
gattggattcgacaacaaaaaagacctgcttatctcggtgggcgatttggttgatcgtggtgcagagaacgttgaatgcctggaattaatcacattcccctggttcagagctgtacgtggaaaccatgagcaaatgatgattgatggcttatcagagcgtggaaacgttaatcactggctgctta

SEQ ID NO: 368 - DNA, 458 bp, Homo sapiens
  misc_feature (3): n equals a,t,g, or c
  misc_feature (4): n equals a,t,g, or c
  misc_feature (6): n equals a,t,g, or c
  misc_feature (15): n equals a,t,g, or c
  misc_feature (27): n equals a,t,g, or c
  misc_feature (170): n equals a,t,g, or c
  misc_feature (193): n equals a,t,g, or c
  misc_feature (232): n equals a,t,g, or c
  misc_feature (246): n equals a,t,g, or c
  misc_feature (250): n equals a,t,g, or c
  misc_feature (316): n equals a,t,g, or c
  misc_feature (340): n equals a,t,g, or c
  misc_feature (395): n equals a,t,g, or c
  misc_feature (399): n equals a,t,g, or c
  misc_feature (404): n equals a,t,g, or c
  misc_feature (415): n equals a,t,g, or c
  misc_feature (433): n equals a,t,g, or c
agnncnatagaaagnacgcctgcaggnaccggtccggaattcccgggtcgacccacgcgtccggagtgagccttgaacgcctggacctggacctcacagctgacagccagccacccgtcttcaaggtcttcccaggcagtaccactgaggactacaaccttattgttatngaacgtggcgctgccgctgcacnaccggccagccagggactgcgcctgcaggaacccctggngccccacccctggntggnatggccattgtcaaggaggaggagacggaggctgccattggagcccctcctactgccactgagggncctgagaccaaacctgtgcttatngctcttgaggagggtcctggtgctgagggttcccggctggactcactagtggcanaacnactcnggctggaagtngtagctctgagggactcngccccagtgttggccgggacctgat

SEQ ID NO: 369 - DNA, 288 bp, Homo sapiens
  misc_feature (15): n equals a,t,g, or c
  misc_feature (17): n equals a,t,g, or c
  misc_feature (47): n equals a,t,g, or c
  misc_feature (56): n equals a,t,g, or c
  misc_feature (71): n equals a,t,g, or c
  misc_feature (103): n equals a,t,g, or c
  misc_feature (114): n equals a,t,g, or c
  misc_feature (225): n equals a,t,g, or c
  misc_feature (239): n equals a,t,g, or c
gcgctggagctgctngngcactgcggcgtgtgcagagagcgcctgcnacccgaganggagccccgcctgcngccctgtttgcactcggcctgtagtgcctgcntagggcccgcngccccgccgccgccaacagctcgggggacggcggggcggcgggcgacggcaccgtggtggactgtcccgtgtgcaagcaacagtgcttctccaaagacatcgtggagaatnatttcatgcgtganagtggcagcaaggctgccaccgacgcccaggatgcgaaccagtgctgca

SEQ ID NO: 370 - DNA, 292 bp, Homo sapiens
  misc_feature (47): n equals a,t,g, or c
  misc_feature (53): n equals a,t,g, or c
  misc_feature (60): n equals a,t,g, or c
  misc_feature (61): n equals a,t,g, or c
  misc_feature (101): n equals a,t,g, or c
  misc_feature (141): n equals a,t,g, or c
  misc_feature (263): n equals a,t,g, or c
ccatctttgcattgttcctcatccgcctccttgctcgccgcagccgnctccgncgcgcgnntcctccgccgccgcggactccggcagctttatcgccagantccctgaactctcgctttctttttaatcccctgcatcggntcaccggcgtgccccaccatgtcagacgcagccgtagacaccagctccgaaatcaccaccaaggacttaaaggagaagaaggaagttttggaaagaggcagaaaatggaagagacggccctncttaacggggaatgctaatttagggaaat

SEQ ID NO: 371 - DNA, 477 bp, Homo sapiens
  misc_feature (35): n equals a,t,g, or c
  misc_feature (276): n equals a,t,g, or c
  misc_feature (313): n equals a,t,g, or c
  misc_feature (342): n equals a,t,g, or c
  misc_feature (374): n equals a,t,g, or c
  misc_feature (399): n equals a,t,g, or c
  misc_feature (410): n equals a,t,g, or c
  misc_feature (427): n equals a,t,g, or c
  misc_feature (434): n equals a,t,g, or c
  misc_feature (447): n equals a,t,g, or c
  misc_feature (448): n equals a,t,g, or c
  misc_feature (451): n equals a,t,g, or c
ggcacaggataattttaagcatttaaatggaattnatctttttcactgtattgatccaaatggttccaagcataaaagaacggacagatcaattttatgttgtttacgaaaaggagaatctggccagtcatggcaagggttaacaaaagaaagggcaaagcttaattggcttagtgtcgacttcaataattgggaaagactgggaagatgattcaaatgaagacatgtctaattttgaatcgtttctctgaggattcacaagacagtgatgatggnaaaaatgccagatctgggagtaagggaatattgtccntcacctgggtttttgaggaaaggaaaatnaactttctctggcaaggttttccataatttgngaggaattccccgagtttgttagcncctaaagggcngttatgctcgtatttgncccactntaacccctttttnncanccggtttgtttttttaaaagggcttc

SEQ ID NO: 372 - DNA, 443 bp, Homo sapiens
  misc_feature (14): n equals a,t,g, or c
  misc_feature (67): n equals a,t,g, or c
  misc_feature (74): n equals a,t,g, or c
  misc_feature (107): n equals a,t,g, or c
  misc_feature (116): n equals a,t,g, or c
  misc_feature (123): n equals a,t,g, or c
  misc_feature (171): n equals a,t,g, or c
  misc_feature (174): n equals a,t,g, or c
  misc_feature (220): n equals a,t,g, or c
  misc_feature (222): n equals a,t,g, or c
  misc_feature (293): n equals a,t,g, or c
  misc_feature (314): n equals a,t,g, or c
  misc_feature (329): n equals a,t,g, or c
  misc_feature (335): n equals a,t,g, or c
  misc_feature (340): n equals a,t,g, or c
  misc_feature (351): n equals a,t,g, or c
  misc_feature (364): n equals a,t,g, or c
  misc_feature (373): n equals a,t,g, or c
  misc_feature (407): n equals a,t,g, or c
  misc_feature (411): n equals a,t,g, or c
  misc_feature (426): n equals a,t,g, or c
  misc_feature (430): n equals a,t,g, or c
ggcagagcactgtnaaactagaacatgctaaatctgttgcttccagagccactgtcctccagaaganatccttnacccctgtaggaatgtttttgaaactaaatttnatgaacgtnaaatttnccagtggttattatgaacttccttgtcgaagttgaaaggtgaacaacnctnatattgcaaataccgtagagcttcagagtgcaagattctccactgnangttgggcattcacaaatgttggatctttcccaccgtgggatgaagggttcagaggcattgcacccaaaatnacccgggtgaacatacccagnccaaagcccaggggnacattnatcgnggacaggcccnccagaatttggcntgttctttnccagttggtaggtgtggaacttggggttgaattnattncttaaccgaattttnccgnttccttaaccgag

SEQ ID NO: 373 - DNA, 464 bp, Homo sapiens
  misc_feature (20): n equals a,t,g, or c
  misc_feature (235): n equals a,t,g, or c
cggatccgcaggcgcacgtngcgatgttgtcctctacagccatgtattcggctcctggcagagacttggggatggaaccgcacagagccgcgggccctttgcagctgcgattttcgccctacgttttcaacggaggtactatactggcaattgctggagaagattttgcaattgttgcttctgatactcgattgagtgaagggttttcaattcatacgcgggatagccccaaatnttacaaattaacagacaaaacagtcattggatgcagcggttttcatggagactgtcttacgctgacaaagattattgaagcaagactaaagatgtataagcattccaataataaggccatgactacgggggcaattgctgcaatgctgtctacaatcctgtattcaaggcgcttctttccatactatgtttacaacatcatcggtggacttgatgaagaaggaaagggg

SEQ ID NO: 374 - DNA, 369 bp, Homo sapiens
  misc_feature (216): n equals a,t,g, or c
  misc_feature (218): n equals a,t,g, or c
  misc_feature (219): n equals a,t,g, or c
  misc_feature (221): n equals a,t,g, or c
  misc_feature (332): n equals a,t,g, or c
  misc_feature (357): n equals a,t,g, or c
  misc_feature (360): n equals a,t,g, or c
  misc_feature (363): n equals a,t,g, or c
  misc_feature (369): n equals a,t,g, or c
ggcacagcctctacagccatgtattcggctcctggcagagacttggggatggaaccgcacagagccgcgggccctttgcagctgcgattttcgccctacgttttcaacggaggtactatactggcaattgctggagaagattttgcaattgttgcttctgatactcgattgagtgaagggttttcaattcatacgcgggatagccccaaatgttgncnnantaacagacaaaacagtcattggatgcagcggttttcatggagactgtcttacgctgacaaagattattgaagcaagactaaagatgtataagcattccaataataaggccntgactacggggggcaatgctggcangcngtnctacan

SEQ ID NO: 375 - DNA, 313 bp, Homo sapiens
  misc_feature (32): n equals a,t,g, or c
  misc_feature (249): n equals a,t,g, or c
  misc_feature (259): n equals a,t,g, or c
  misc_feature (268): n equals a,t,g, or c
  misc_feature (293): n equals a,t,g, or c
  misc_feature (308): n equals a,t,g, or c
tacccttcatcactaaaggccgcctgtgcgtntttttttacgggatttttttatgtcgatgtacacaaccgcccaactgctggcggcaaatgagcagaaatttaagtttgatccgctgtttctgcgtctctttttccgtgagagctatcccttcaccacggaggaaagtctatctctcacaaattccgggactggtaaacatggcgctgtacgtttcgccgattgtttccggtgaaggttatcccgttnccctggcggnttccacctntgaatttaaggccgggataatgtcnaagcccgaagcatgnaagtg

SEQ ID NO: 376 - DNA, 375 bp, Homo sapiens
cgggttccggtgaccacgaaggcggcaaaggcgacggaatggaggaggtgcctcacgactgtccaggggccgacagcgcccaggcgggcagaggggcttcatgtcagggatgccccaaccagcggctgtgcgcttctggagcgggggccactccggacacggctatagaggaaatcaaagagaaaatgaagactgtaaaacacaaaatcttggtattgtctgggaaaggcggtgttgggaaaagcacattcagcgcccaccttgcccatggcctagcagaggatgaaaacacacagattgctcttctagacatcgatatatgtgggccatcgattcccaagataatgggattggaaggagagcaggttcaccaga

SEQ ID NO: 377 - DNA, 434 bp, Homo sapiens
  misc_feature (9): n equals a,t,g, or c
  misc_feature (17): n equals a,t,g, or c
  misc_feature (22): n equals a,t,g, or c
  misc_feature (32): n equals a,t,g, or c
  misc_feature (33): n equals a,t,g, or c
  misc_feature (47): n equals a,t,g, or c
  misc_feature (58): n equals a,t,g, or c
  misc_feature (64): n equals a,t,g, or c
  misc_feature (69): n equals a,t,g, or c
  misc_feature (73): n equals a,t,g, or c
  misc_feature (98): n equals a,t,g, or c
  misc_feature (112): n equals a,t,g, or c
  misc_feature (116): n equals a,t,g, or c
  misc_feature (118): n equals a,t,g, or c
  misc_feature (146): n equals a,t,g, or c
  misc_feature (151): n equals a,t,g, or c
  misc_feature (161): n equals a,t,g, or c
  misc_feature (163): n equals a,t,g, or c
  misc_feature (193): n equals a,t,g, or c
  misc_feature (212): n equals a,t,g, or c
  misc_feature (214): n equals a,t,g, or c
  misc_feature (228): n equals a,t,g, or c
  misc_feature (235): n equals a,t,g, or c
  misc_feature (243): n equals a,t,g, or c
  misc_feature (250): n equals a,t,g, or c
  misc_feature (262): n equals a,t,g, or c
  misc_feature (263): n equals a,t,g, or c
  misc_feature (264): n equals a,t,g, or c
  misc_feature (265): n equals a,t,g, or c
  misc_feature (267): n equals a,t,g, or c
  misc_feature (279): n equals a,t,g, or c
  misc_feature (301): n equals a,t,g, or c
  misc_feature (320): n equals a,t,g, or c
  misc_feature (330): n equals a,t,g, or c
  misc_feature (337): n equals a,t,g, or c
  misc_feature (351): n equals a,t,g, or c
  misc_feature (370): n equals a,t,g, or c
  misc_feature (381): n equals a,t,g, or c
  misc_feature (409): n equals a,t,g, or c
ggcacgagngtggctcnagggngtcaccttcnntgttaccaccgttnacaccaaaagncggacngaganagtncagaagctgtgcccaggggggcagntcccattcctgctntatngnactgaagtgcacacagacaccaacaagnttgcngaatttctgnangcagtgctgtgccctcccaggtaccccaanctggcagctctgaaccctnantccaacacagctgngctgganatatttgncaaattntctgcctacatnnnnanttcaaacccagnactcaatgacaatctggagaanggactcctgaaagccctgnacgttttagncaattanttaacatccccccnctcagaagaagtggatganaccagtgctgnagtgaaggtgtctctcagaagaagtttntggatagcacgagctcaccctgggg

SEQ ID NO: 378 - DNA, 506 bp, Homo sapiens
  misc_feature (133): n equals a,t,g, or c
  misc_feature (294): n equals a,t,g, or c
  misc_feature (367): n equals a,t,g, or c
  misc_feature (376): n equals a,t,g, or c
  misc_feature (386): n equals a,t,g, or c
  misc_feature (389): n equals a,t,g, or c
  misc_feature (421): n equals a,t,g, or c
  misc_feature (440): n equals a,t,g, or c
  misc_feature (443): n equals a,t,g, or c
  misc_feature (472): n equals a,t,g, or c
  misc_feature (479): n equals a,t,g, or c
  misc_feature (492): n equals a,t,g, or c
  misc_feature (493): n equals a,t,g, or c
  misc_feature (496): n equals a,t,g, or c
  misc_feature (503): n equals a,t,g, or c
aattttcactcccctcagaacataacatagtaaatggattgaattatgaagaatggtttttatgcgacttaccgcagcaaaaataaagggaaagataagcgctcaataaacctgtctgttttccttaattctntgctggctgataatcatcacctgcaggttggctccaattatttgtatattcataaaatcgatggaaaaacttttctctttaccaaaacaaatgacaagagtctggttcagaagataaatcgctctaaagcttcagttgaagatattaagaacagcctcgtngatgacggaatcattgggattcccatcttttttgtttgttgaaggcgacaccattggtttttgccagaactgnttttcgggncggccacatncgnttttgacaggtttttttaatcggggaagggantgtccttaaggcgtggggngcngttcagttggggccctgttggggggaccnccaaggnggtggttatggcnnggntttcatnggc

SEQ ID NO: 379 - DNA, 550 bp, Homo sapiens
  misc_feature (6): n equals a,t,g, or c
  misc_feature (9): n equals a,t,g, or c
gacganacnaaccctcactaaagggaacaaaagctggagctccaccgcggtgcggccgctctagaactagtggatcccccgggctgcaggaattcggcacgaggccatccagactgaggaagacccggaaacttaggggccacgtgagccacggccacggccgcataggcaagcaccggaagcaccccggcggccgcggtaatgctggtggtctgcatcaccaccggatcaacttcgacaaataccacccaggctactttgggaaagttggtatgaagcattaccacttaaagaggaaccagagcttctgcccaactgtcaaccttgacaaattgtggactttggtcagtgaacagacacgggtgaatgctgctaaaaacaagactggggctgctcccatcattgatgtggtgcgatcgggctactataaagttctgggaaagggaaagctcccaaagcagcctgtcatcgtgaaggccaaattcttcagcagaagagctgaggagaagattaagagtgttgggggggcctgtgtcctggtggcttgaag

SEQ ID NO: 380 - DNA, 573 bp, Homo sapiens
  misc_feature (4): n equals a,t,g, or c
  misc_feature (6): n equals a,t,g, or c
  misc_feature (10): n equals a,t,g, or c
  misc_feature (160): n equals a,t,g, or c
aagncnaganagccaaccctcactaaagggaacaaaagctggagctccaccgcggtgcggccgctctagaactagtggatcccccgggctgcaggaattcggcacgagcgcaaagaagggtggcgagaagaaaaagggccgttctgccatcaacgaaggntaacccgagaatacaccatcaacattcacaagcgcatccatggagtgggcttcaagaagcgtgcacctcgggcactcaaagagattcggaaatttgccatgaaggagatgggaactccagatgtgcgcattgacaccaggctcaacaaagctgtctgggccaaaggaataaggaatgtgccataccgaatccgtgtgcggctgtccagaaaacgtaatgaggatgaagattcaccaaataagctatatactttggttacctatgtacctgttaccactttcaaaatttctgtgctaaacagtgttacagtcgccaagagcccataaagggagccctcctggaagtggatgaggccttgggtctcggctcttcattgcttcctgagctgcagcagatgcctttacaaccaagct

SEQ ID NO: 381 - DNA, 531 bp, Homo sapiens
  misc_feature (5): n equals a,t,g, or c
  misc_feature (8): n equals a,t,g, or c
gcagnacnaaccctcactaaagggaacaaaagctggagctccaccgcggtgcggccgctctagaactagtggatcccccgggctgcaggaattcggcacgaggcggcgttggcggcttgtgcagcaatggccaagatcaaggctcgagatcttcgcgggaagaagaaggaggagctgctgaaacagctggacgacctgaaggtggagctgtcccagctgcgcgtcgccaaagtgacaggcggtgcggcctccaagctctctaagatccgagtcgtccggaaatccattgcccgtgttctcacagttattaaccagactcagaaagaaaacctcaggaaattctacaagggcaagaagtacaagcccctggacctgcggcctaagaagacacgtgccatgcgccgccggctcaacaagcacgaggagaacctgaagaccaagaagcagcagcggaaggagcggctgtacccgctgcggaagtacgcggtcaaggcctgaggggcgcattgtcaataaagcacagtggctgag

SEQ ID NO: 382 - DNA, 300 bp, Homo sapiens
  misc_feature (1): n equals a,t,g, or c
  misc_feature (5): n equals a,t,g, or c
  misc_feature (40): n equals a,t,g, or c
  misc_feature (43): n equals a,t,g, or c
  misc_feature (59): n equals a,t,g, or c
  misc_feature (171): n equals a,t,g, or c
  misc_feature (172): n equals a,t,g, or c
  misc_feature (175): n equals a,t,g, or c
  misc_feature (179): n equals a,t,g, or c
  misc_feature (184): n equals a,t,g, or c
  misc_feature (190): n equals a,t,g, or c
  misc_feature (203): n equals a,t,g, or c
  misc_feature (271): n equals a,t,g, or c
  misc_feature (292): n equals a,t,g, or c
  misc_feature (293): n equals a,t,g, or c
  misc_feature (300): n equals a,t,g, or c
ngggngtaccacaaatataaggcaaagaggaactgctggncangagtacggggtgtggncatgaatcctgtggagcatccttttggaggtggcaaccaccagcacatcggcaagccctccaccatccgcagagatgcccctgctggccgcaaagtgggtctcattgctgcnngcnggantggangtctcnggggaaccaagantgtgcaggagaaagagaactagtgctgagggcctcaataaagtttgtgtttatgccaaaaaaaaaaanaaaaaaaaaaaaaaaaaagannaaagagn

SEQ ID NO: 383 - DNA, 475 bp, Homo sapiens
  misc_feature (36): n equals a,t,g, or c
  misc_feature (146): n equals a,t,g, or c
  misc_feature (363): n equals a,t,g, or c
  misc_feature (367): n equals a,t,g, or c
  misc_feature (401): n equals a,t,g, or c
  misc_feature (404): n equals a,t,g, or c
  misc_feature (415): n equals a,t,g, or c
  misc_feature (450): n equals a,t,g, or c
  misc_feature (451): n equals a,t,g, or c
atgacgccggtgcagcgggggggcccgggggcctgngtggccctgggatggggaaccgcggtggcttccgcgaggtttcggcagtggcatccggggccggggtcgcggccgtggacggggccggggccgaggccgcggactcgcgnaggcaaggccgaggataaggagtggatgcccgtcaccaagttgggccgcttggtcaaggacatgaagatcaagtccctggaggagatctatctcttctccctgcccattaaggaatcagagatcattgattcttcctgggggctctctcaaggatgagttttgaagatatgccatgcagaagcagaccctgccggccacgcaccagttcaagcattnttgnaacgggattaaatgccactcgtttggtttaatgnccnagagtggcacncatcctgggcaaaactggcaaatttcaagtccttnnaagtatggggaaaatggaacccaa

SEQ ID NO: 384 - DNA, 127 bp, Homo sapiens
  misc_feature (5): n equals a,t,g, or c
  misc_feature (8): n equals a,t,g, or c
  misc_feature (31): n equals a,t,g, or c
  misc_feature (62): n equals a,t,g, or c
  misc_feature (71): n equals a,t,g, or c
  misc_feature (103): n equals a,t,g, or c
  misc_feature (124): n equals a,t,g, or c
caatntgnagaccagattcctaaggctgcanaggggacagtgggatctattttaggaccgangagattaancagagacacaggcaattgtatgtcagcagctngatttaacccacctaaaaggngcg

SEQ ID NO: 385 - DNA, 317 bp, Homo sapiens
  misc_feature (30): n equals a,t,g, or c
  misc_feature (151): n equals a,t,g, or c
  misc_feature (187): n equals a,t,g, or c
  misc_feature (203): n equals a,t,g, or c
  misc_feature (231): n equals a,t,g, or c
  misc_feature (264): n equals a,t,g, or c
  misc_feature (308): n equals a,t,g, or c
  misc_feature (311): n equals a,t,g, or c
  misc_feature (316): n equals a,t,g, or c
ggcacgagggatgtgcgacgtgtgcctggngtagccccgactcttgtacggtcggcatctgagaccagtgagaaacgccccttcatgtgtgcttacccaggctgcaataagagatattttaagctgtcccacttacagatgcacagcaggnaagcacactggtgagaaaccataccagtgtgacttnaaggactgtgaacgangttttctcgttcagaccagctcaaaagncaccaaaggaggacatacaggtgtgaaccattnccagtgtaaaattgttcagcgaaattctcccggtccgaccaacngangaccna

SEQ ID NO: 386 - DNA, 433 bp, Homo sapiens
  misc_feature (295): n equals a,t,g, or c
  misc_feature (311): n equals a,t,g, or c
  misc_feature (359): n equals a,t,g, or c
  misc_feature (385): n equals a,t,g, or c
  misc_feature (405): n equals a,t,g, or c
  misc_feature (407): n equals a,t,g, or c
  misc_feature (427): n equals a,t,g, or c
tttcaaaagctatttaggtgacactatagaaggtagcctgcaggttaccggtccggaaattcccgggtcgacccacgcgtccgccgagagccttagccgacggaaactggacactggaaccggcagcgccatgagactcctcccccgcttgctgctgcttctcttactcgtgttccctgccactgtcttgttccgaggcggccccagaggcttgttagcagtggcacaagatcttacagaggatgaagaaacagtagaagattccataattgaggatgaagatgatgaagccgangtagaagaagatgaanccacagattttgtagaagataaagaggaagaagatgtgtctggtgaanctgaaactttaccgagtgcagatacnactatactgtttttaaaggngnagattttccgccaataacantgtgaa

SEQ ID NO: 387 - DNA, 407 bp, Homo sapiens
  misc_feature (315): n equals a,t,g, or c
  misc_feature (356): n equals a,t,g, or c
  misc_feature (359): n equals a,t,g, or c
  misc_feature (373): n equals a,t,g, or c
  misc_feature (376): n equals a,t,g, or c
  misc_feature (407): n equals a,t,g, or c
atttgaagcaaacaggcagcgcgcgacaatggcggtcgctcgtgcagctttggggccattggtgacgggtctgtacgacgtgcaggctttcaagtttggggacttcgtgctgaagagcgggctttcctcccccatctacatcgatctgcggggcatcgtgtctcgaccgcgtcttctgagtcaggttgcagatattttattccaaactgcccaaaatgcaggcatcagttttgacaccgtgtgtggagtgccttatacagctttgccattggctacagttatctgttcaaccaatcaaattccaatgcttattanaaggaaagaaacaaaggattatggaactaagcgtcttgtanaangaatattaatccanganaaactgtttaatcattgaaatgttgtcccan

SEQ ID NO: 388 - DNA, 244 bp, Homo sapiens
  misc_feature (215): n equals a,t,g, or c
  misc_feature (221): n equals a,t,g, or c
ttcgttcatctatcggatcgccacactcacaacaatgagtggcagatatagcctggtggttcaggcggcgcatttttattgctgtgttgcgctgtaattcttctatttctgatgctgaatcaatgatgtctgccatctttcattaatccctgaactgttggttaatacgcttgagggtgaatgcgaataataaaaaaggagcctgtagctccctnatgatnttgcttttcatgttcatcgttcc

SEQ ID NO: 389 - DNA, 239 bp, Homo sapiens
  misc_feature (1): n equals a,t,g, or c
  misc_feature (21): n equals a,t,g, or c
  misc_feature (55): n equals a,t,g, or c
  misc_feature (64): n equals a,t,g, or c
  misc_feature (71): n equals a,t,g, or c
  misc_feature (116): n equals a,t,g, or c
  misc_feature (128): n equals a,t,g, or c
  misc_feature (163): n equals a,t,g, or c
  misc_feature (185): n equals a,t,g, or c
  misc_feature (196): n equals a,t,g, or c
  misc_feature (202): n equals a,t,g, or c
  misc_feature (205): n equals a,t,g, or c
nggactggcgtcagacgtcgnattccggcgcccacggtcggcttaaaccctggtncaatcctgncgcccgncgtgatgccagggaagacagggcgacctggaagtccaactacttncttaagatcatncaacgtattgggatgattatcctaaaatgggttcnattggtgggtagcgagtacganatggtggggcntcctanagntagtatggcgagctagagtcccggctaatgttcc

SEQ ID NO: 390 - DNA, 382 bp, Homo sapiens
  misc_feature (5): n equals a,t,g, or c
  misc_feature (54): n equals a,t,g, or c
  misc_feature (69): n equals a,t,g, or c
  misc_feature (102): n equals a,t,g, or c
  misc_feature (103): n equals a,t,g, or c
  misc_feature (108): n equals a,t,g, or c
  misc_feature (126): n equals a,t,g, or c
  misc_feature (169): n equals a,t,g, or c
  misc_feature (192): n equals a,t,g, or c
  misc_feature (217): n equals a,t,g, or c
  misc_feature (219): n equals a,t,g, or c
  misc_feature (221): n equals a,t,g, or c
  misc_feature (235): n equals a,t,g, or c
  misc_feature (342): n equals a,t,g, or c
  misc_feature (345): n equals a,t,g, or c
  misc_feature (346): n equals a,t,g, or c
  misc_feature (360): n equals a,t,g, or c
  misc_feature (374): n equals a,t,g, or c
tcaangcgcaattaaccctcactaaagggaacaaaagctgggaacgatctggtntctctgcgcgctgcncgcacactgaggccgcccgggacaaagcccggnntcggngcgacctttggtcccggnctcagtgagcgagcgagcgcgcagagagggagtggccaacttnatcactaggggttccttgtagtnaatgattaacccgccatgctacttngncnacgtagccatgggntaccaagctcgagctctctagactcgacgcgcgtaatacgactcactatagggcgaatttgagctccaccgcggttgcggccgctctactagagtcgacctcatggnttnnccccgaaacccgcnaacacccgctgacncgccctta

SEQ ID NO: 391 - DNA, 375 bp, Homo sapiens
  misc_feature (6): n equals a,t,g, or c
  misc_feature (7): n equals a,t,g, or c
  misc_feature (48): n equals a,t,g, or c
  misc_feature (70): n equals a,t,g, or c
  misc_feature (104): n equals a,t,g, or c
  misc_feature (117): n equals a,t,g, or c
  misc_feature (138): n equals a,t,g, or c
  misc_feature (146): n equals a,t,g, or c
  misc_feature (159): n equals a,t,g, or c
  misc_feature (208): n equals a,t,g, or c
  misc_feature (223): n equals a,t,g, or c
  misc_feature (261): n equals a,t,g, or c
  misc_feature (269): n equals a,t,g, or c
  misc_feature (275): n equals a,t,g, or c
  misc_feature (279): n equals a,t,g, or c
  misc_feature (299): n equals a,t,g, or c
  misc_feature (351): n equals a,t,g, or c
  misc_feature (366): n equals a,t,g, or c
  misc_feature (370): n equals a,t,g, or c
tgcaanngaatacacactaaggacaagtggactcacggtgcgccctcngactagtggtcccgggtgcagntgccagggtggcctgagcgatctacggatgggcngtatggagtggangagacgagatgcgggtgttanagcagggnctgaccggagtgncacacatgagtgtcaggtgcaggtagtccgagtcggcgacatgagcctngagtagagtcatcantcgatgagatctggaggcaactggcgagcaagaccgtntggtgcantgtcantcangctgttgcaggtgagagcantgcactcgtcgagtggcgagacagatcaatctctgttagcgggtggaggttncactcgcgctgtggnggtncactg

SEQ ID NO: 392 - DNA, 121 bp, Homo sapiens
  misc_feature (3): n equals a,t,g, or c
  misc_feature (9): n equals a,t,g, or c
  misc_feature (13): n equals a,t,g, or c
  misc_feature (56): n equals a,t,g, or c
  misc_feature (67): n equals a,t,g, or c
  misc_feature (113): n equals a,t,g, or c
  misc_feature (118): n equals a,t,g, or c
  misc_feature (120): n equals a,t,g, or c
gantcatcngagngtgtggatttgagccgccgcattttttaaccctaaatctcganatgcatcgtgnttcctgtccattggactgtaaggtttatgtaggcatcttgggaacnatggnana

SEQ ID NO: 393 - DNA, 83 bp, Homo sapiens
  misc_feature (65): n equals a,t,g, or c
  misc_feature (66): n equals a,t,g, or c
  misc_feature (70): n equals a,t,g, or c
  misc_feature (73): n equals a,t,g, or c
ggcagagaaaaaaaaaaaaaaaaaaaaaaaaaaaaaaaaaaaaaaaaaaaaaaaaaaaaaaaaanncccnggngggggccccc

SEQ ID NO: 394 - DNA, 218 bp, Homo sapiens
  misc_feature (13): n equals a,t,g, or c
  misc_feature (64): n equals a,t,g, or c
gtcggcgcagaangcgccccgcacccccgccaggcgcatgtctgcacctccgcttgccaaaggncctcggtcagcgactggatgctcgccatcaaggtccagtggaagttcttcaagaggaaaggcgcccccgccccaggcttccgcgcccagcgctcgccacgctcagtgcccgttttaccaataaactgagcgaccccaaaaaaaaaaaaaaaaag

SEQ ID NO: 395 - DNA, 83 bp, Homo sapiens
  misc_feature (11): n equals a,t,g, or c
  misc_feature (13): n equals a,t,g, or c
  misc_feature (83): n equals a,t,g, or c
aattcggcacngnaaaaaaaaaaaaaaaaaaaaaaaaaaaaaaaaaaaaaaaaaaaaaaaaaaaaaaaaaaaaaaaaaaaaan

SEQ ID NO: 396 - DNA, 70 bp, Homo sapiens
  misc_feature (69): n equals a,t,g, or c
aattcggcacagaaaaaaaaaaaaaaaaaaaaaaaaaaaaaaaaaaaaaaaaaaaaaaaaaaaaaaaana

SEQ ID NO: 397 - DNA, 140 bp, Homo sapiens
  misc_feature (50): n equals a,t,g, or c
  misc_feature (57): n equals a,t,g, or c
  misc_feature (74): n equals a,t,g, or c
  misc_feature (93): n equals a,t,g, or c
  misc_feature (113): n equals a,t,g, or c
  misc_feature (114): n equals a,t,g, or c
  misc_feature (115): n equals a,t,g, or c
  misc_feature (139): n equals a,t,g, or c
aatttgaccagagaacaagaataacccggcctcagcgccgggttttcttngcctcangatcgcccccaaaacanataaccaattgtatttatngaaaaataaatagatacaannnactaaacatagcaattcagatctnt

SEQ ID NO: 398 - DNA, 157 bp, Homo sapiens
  misc_feature (10): n equals a,t,g, or c
  misc_feature (65): n equals a,t,g, or c
  misc_feature (121): n equals a,t,g, or c
  misc_feature (122): n equals a,t,g, or c
  misc_feature (123): n equals a,t,g, or c
  misc_feature (126): n equals a,t,g, or c
  misc_feature (134): n equals a,t,g, or c
  misc_feature (150): n equals a,t,g, or c
aattcggcanagctcaagcagacggggctcaagggggttacatttaataaaaggatgaagatggnaaaaaaaaaaaaaaaaaaaaaaaaaaaaaaaaaaaaaaaaaaaaaaaaaaaaaaannnccngggggggncccccccccccctttnccccctt

SEQ ID NO: 399 - DNA, 358 bp, Homo sapiens
  misc_feature (5): n equals a,t,g, or c
  misc_feature (84): n equals a,t,g, or c
  misc_feature (204): n equals a,t,g, or c
  misc_feature (207): n equals a,t,g, or c
  misc_feature (302): n equals a,t,g, or c
  misc_feature (305): n equals a,t,g, or c
  misc_feature (308): n equals a,t,g, or c
  misc_feature (331): n equals a,t,g, or c
  misc_feature (341): n equals a,t,g, or c
ggcanagcggcagaggcggctcccactctcggaaccttgtcctgtttttcccccagctcggcaagcgccatatgagcctggcgncgccaatagcgaatcctgttgtgggctttttggcctattcccgcccctcagtcttgccgggatggcaccgcccgcataggacttccagggttgggctgagtgggagttcgactgctgggnctngtaattctcgctttgggggctgctccttccaggctggggacacactggggcccgttgttcggtctcccgtcctccgacatcttgtctggaacttncgnctngcagtttccataggagttggagnctgtgcggcntaattttggtggaaaaa

SEQ ID NO: 400 - DNA, 399 bp, Homo sapiens
  misc_feature (15): n equals a,t,g, or c
  misc_feature (27): n equals a,t,g, or c
  misc_feature (33): n equals a,t,g, or c
  misc_feature (46): n equals a,t,g, or c
  misc_feature (70): n equals a,t,g, or c
  misc_feature (83): n equals a,t,g, or c
  misc_feature (115): n equals a,t,g, or c
  misc_feature (117): n equals a,t,g, or c
  misc_feature (169): n equals a,t,g, or c
  misc_feature (171): n equals a,t,g, or c
  misc_feature (213): n equals a,t,g, or c
  misc_feature (216): n equals a,t,g, or c
  misc_feature (218): n equals a,t,g, or c
  misc_feature (231): n equals a,t,g, or c
  misc_feature (239): n equals a,t,g, or c
  misc_feature (245): n equals a,t,g, or c
  misc_feature (248): n equals a,t,g, or c
  misc_feature (255): n equals a,t,g, or c
  misc_feature (262): n equals a,t,g, or c
  misc_feature (269): n equals a,t,g, or c
  misc_feature (279): n equals a,t,g, or c
  misc_feature (283): n equals a,t,g, or c
  misc_feature (292): n equals a,t,g, or c
  misc_feature (316): n equals a,t,g, or c
  misc_feature (325): n equals a,t,g, or c
  misc_feature (349): n equals a,t,g, or c
  misc_feature (364): n equals a,t,g, or c
  misc_feature (382): n equals a,t,g, or c
ttttttttttttttnaaaagggcacanatacanttttaccgtttanaccaaaccagaatcaaaacccaantcagagtatccanaaatccaagccaggtcaaaaccaaaacgaaantntcaagcaatccaaatcaagtcaaaaacaaaaaccaaagtgccggtacaggcntnccgtgggtgatcaggccacccttccactcaaatggagtgggnaantnccaaagactagtnttaccaantttcanatntccggantccaagngcctgtnccttcccagngttnagccgctgnattgatcctctgtgggggcctgcnaaacgccantctggcgaggtgttccactggggnaattgcctacccggnagtgctctcaggttctgngtccctcaagctggcca

SEQ ID NO: 401 - DNA, 189 bp, Homo sapiens
  misc_feature (1): n equals a,t,g, or c
  misc_feature (11): n equals a,t,g, or c
  misc_feature (162): n equals a,t,g, or c
  misc_feature (165): n equals a,t,g, or c
  misc_feature (166): n equals a,t,g, or c
  misc_feature (187): n equals a,t,g, or c
naattcggcanagcaaaccacaccttctctttcttatgtctttttactacaaactacaagacaattgttgaaacctgctatacatgtttattttaataaattgatggcaaaaaaaaaaaaaaaaaaaaaaaaaaaaaaaaaaaaaaaaaaaaaaaaaaaaanccnnggggggggccccccccccccntt

SEQ ID NO: 402 - DNA, 174 bp, Homo sapiens
  misc_feature (10): n equals a,t,g, or c
  misc_feature (73): n equals a,t,g, or c
  misc_feature (103): n equals a,t,g, or c
  misc_feature (107): n equals a,t,g, or c
  misc_feature (130): n equals a,t,g, or c
  misc_feature (132): n equals a,t,g, or c
  misc_feature (146): n equals a,t,g, or c
  misc_feature (149): n equals a,t,g, or c
  misc_feature (167): n equals a,t,g, or c
aattcggcanagctgaggcaggagaatcgcttgaattcgggaggcagagctgagatcacacctctgacactcnagcctgggtgacagagcgagactccgtctnaggnaaggaaaaaaaaaaaaaaaaaancncggggggggccccngtncccaattggccctatagngggtcgt

SEQ ID NO: 403 - DNA, 263 bp, Homo sapiens
  misc_feature (5): n equals a,t,g, or c
  misc_feature (231): n equals a,t,g, or c
  misc_feature (236): n equals a,t,g, or c
  misc_feature (242): n equals a,t,g, or c
  misc_feature (252): n equals a,t,g, or c
  misc_feature (260): n equals a,t,g, or c
ggcanagccaacccagcagtccttccctcagctgcctaggaggaagggacccagctgggtctgggaccacaagggaggagactgcaccccactgcctctgggccctggctgtgggcagaggccaccgtgtgtgtcccgagtaaccgtgccgttgtcgtgtgatgccataagcgtctgtgcgtggagtccccaatgaaacctgtggtcctgcctgggcaaaaaaaaaaaaanaaaanaaaaanaaagaaaaanaaaaaaanaaa

SEQ ID NO: 404 - DNA, 478 bp, Homo sapiens
  misc_feature (159): n equals a,t,g, or c
  misc_feature (259): n equals a,t,g, or c
  misc_feature (427): n equals a,t,g, or c
tcgacccacgcgtccgggggctgcagcatgttgctgaggagtgaggaatagttgagccccaagtcctgaagaggcgggccagccaggctgacatctgtgtttcaagtggggctcgccatgccgggggttcataggtcactggctctccaagtgccagangtgggcaggtggtggcactgagcccccccaacactgtgccctggtggagaaagcactgacctgtcatgcccccctcaaacctcctcttctgacgtgcctnttgcacccctcccattaggacaatcagtcccctcccatctgggagtccccttttcttttctaccctagccattcctggtacccagccatctgcccaagggtgccccctcctctcccatccccctgccctcgtgggcagcccggctggttttgtaaatgtgggttgtgnacagtgattttttcttgtatttaaaaaaggccagcattgtggttcattaaa

SEQ ID NO: 405 - DNA, 223 bp, Homo sapiens
  misc_feature (147): n equals a,t,g, or c
  misc_feature (158): n equals a,t,g, or c
  misc_feature (172): n equals a,t,g, or c
  misc_feature (217): n equals a,t,g, or c
  misc_feature (223): n equals a,t,g, or c
agacagcaggacggtggccatggaagtcggaatccgctaaggagtgtgtaacaactcacctgccgaatcaactagccctgaaaatggatggcgctggagcgtcgggcccatacccgtccgtcgccggcagtcgagagtggacgggancggcgggggcngcgcgcgcgcgcgncgtgatggtgtgcgtcggagggcggcggcggcggcgggggtgtgnggtccn

SEQ ID NO: 406 - DNA, 104 bp, Homo sapiens
  misc_feature (8): n equals a,t,g, or c
  misc_feature (37): n equals a,t,g, or c
  misc_feature (81): n equals a,t,g, or c
  misc_feature (93): n equals a,t,g, or c
  misc_feature (103): n equals a,t,g, or c
cccacgcntccgccgacagcagcagcctcaccatgangttgctgatggtcctcatgctggcggccctctcccagcactgcnacgcaggctctngctgcccctna

SEQ ID NO: 407 - DNA, 66 bp, Homo sapiens
  misc_feature (17): n equals a,t,g, or c
  misc_feature (21): n equals a,t,g, or c
  misc_feature (57): n equals a,t,g, or c
  misc_feature (66): n equals a,t,g, or c
gccctatagtgagtctngtancaattcactggccgtcgttttacaacgtcgtgacgnggaaaactn

SEQ ID NO: 408 - DNA, 278 bp, Homo sapiens
  misc_feature (6): n equals a,t,g, or c
  misc_feature (19): n equals a,t,g, or c
  misc_feature (252): n equals a,t,g, or c
  misc_feature (275): n equals a,t,g, or c
gggcanagcaagctcctgnacctcaagtgatccacatgccttggttgaccaaattgctgggattacaggcatgagccaatatgaccagctcaaacatcttctttttaaatgtcagaagcatgtatagtgattatttcttattttttcccccttgatccatctcaccagatgtttgttgattttataagaattttcaaactaccagcttctggctttgttgaacttgggatttctgtttcactaattttcttnctcctgtcttgtacttactttgntgg

SEQ ID NO: 409 - DNA, 168 bp, Homo sapiens
  misc_feature (16): n equals a,t,g, or c
  misc_feature (38): n equals a,t,g, or c
  misc_feature (127): n equals a,t,g, or c
  misc_feature (140): n equals a,t,g, or c
  misc_feature (143): n equals a,t,g, or c
  misc_feature (145): n equals a,t,g, or c
  misc_feature (167): n equals a,t,g, or c
aataaaactctaaaangatcactataaaaaaagcaggnacgcctgcaggtaccggtccggaattcccgggtcgacccacgcgtccgacggctgcgagaagacgacagaagggcacggctgcgagaanacgacagaagggngcnantgaaagaaggcggcagaaaggnt

SEQ ID NO: 410 - DNA, 415 bp, Homo sapiens
  misc_feature (307): n equals a,t,g, or c
  misc_feature (347): n equals a,t,g, or c
tgaatacctaagatttctgtcttggggtttttggtgcatgcagttgattacttcttatttttcttaccaattgtgaatgttggtgtgaaacaattaatgaagcttttgaatcatccctattctgtgttttatctagtcacataaatggattaattactaatttcagttgagaccttctaattggtttttactgaaacattgagggaacacaaatttatgggcttcctgatgatgattcttctaggcatcatgtcctatagtttgtcatccctgatgaatgtaaaattacactgttcacaaaggtttngtctcctttccactgctattaatcatggtcactctccccnaaatattatattttttctattaaaagaaaaaaatggaaaaaaattacaaggcaatggaaactattata

SEQ ID NO: 411 - DNA, 636 bp, Homo sapiens
  misc_feature (383): n equals a,t,g, or c
  misc_feature (512): n equals a,t,g, or c
  misc_feature (519): n equals a,t,g, or c
  misc_feature (544): n equals a,t,g, or c
  misc_feature (547): n equals a,t,g, or c
  misc_feature (583): n equals a,t,g, or c
  misc_feature (599): n equals a,t,g, or c
  misc_feature (603): n equals a,t,g, or c
gcagatcagacgtggcgacccgctgaatttaagcatattagtcagcggaggagaagaaactaaccaggattccctcagtaacggcgagtgaacagggaagagcccagcgccgaatccccgccccgcggcggggcgcgggacatgtggcgtacggaagacccgctccccggcgccgctcgtggggggcccaagtccttctgatcgaggcccagcccgtggacggtgtgaggccggtagcggcccccggcgcgccgggcccgggtcttcccggagtcgggttgcttgggaatgcagcccaaagcgggtggtaaactccatctaaggctaaatccccttgtaaatttaactgttagtccaaagaggaacagctctttggacactangaaaaaaccttgtagagagagtaaaaaatttaacacccatagtaggcctaaaagcagccaccaattaagaaagcgttcaagctcaacacccactacctaaaaaatcccaaacatataactgaactcctnacacccnattggaccaatctatcaccctatanaanaactaatggtagtataagtaacatgaaaacattctncttcgcataagcctgngtanattaaaacacttgaactgaccattaacaggcca

SEQ ID NO: 412 - DNA, 182 bp, Homo sapiens
  misc_feature (129): n equals a,t,g, or c
  misc_feature (166): n equals a,t,g, or c
  misc_feature (169): n equals a,t,g, or c
  misc_feature (170): n equals a,t,g, or c
  misc_feature (172): n equals a,t,g, or c
ccattgatttttatcaatagtcgtattcatacggatagtcctggtattgttccatcacattctgaggatgctcttcgaactcttcaaattcttcttccatatatcaccttaaatagtggattgcggtantaaagattgtgcctgtcttttaaccacatcaggctcnganngntctcgtgaac

SEQ ID NO: 413 - DNA, 387 bp, Homo sapiens
  misc_feature (157): n equals a,t,g, or c
  misc_feature (253): n equals a,t,g, or c
  misc_feature (317): n equals a,t,g, or c
  misc_feature (323): n equals a,t,g, or c
  misc_feature (349): n equals a,t,g, or c
  misc_feature (351): n equals a,t,g, or c
  misc_feature (364): n equals a,t,g, or c
tcgacccacgcgtccgcccacgcgtccgccaagaccaccctcctttcatttgctagaaggactcactagactcaggaaagctgttaggctcacagttacagtttattacagtaaaaggacagagattaagatcagcaaagggaggaggtgcacagcnacgttccacgacagatgaggcgacggcttccatctgccctctcccagtggagccatataggcagcacctgattctcacagcaacatgtgacaacanccaagaagtactgccaatactgccaaccagagcagcttcactcggagatctttgtgttccagantttttngtttgtcttggagacagggtctgggncngtttgggcagacnaagagtacatggtggagattcac

SEQ ID NO: 414 - DNA, 276 bp, Homo sapiens
  misc_feature (60): n equals a,t,g, or c
  misc_feature (186): n equals a,t,g, or c
  misc_feature (195): n equals a,t,g, or c
  misc_feature (237): n equals a,t,g, or c
  misc_feature (260): n equals a,t,g, or c
  misc_feature (266): n equals a,t,g, or c
gcaaaggtccatactggttacttggtttcattgccaccacttagtggatgttcagtttanaaccattttgtctgctccctctggaagccttgcgcatagcttactttgtaattgttggagaataactgctgaatttttagctgttttgagttgattcgcaccactgcaccacaactcactatgaanactatttancttatttattatcttgtgaaaagtataccatgaaaattttgntcatactgtatttatcaagtatnattaanagcactagat

SEQ ID NO: 415 - DNA, 192 bp, Homo sapiens
  misc_feature (78): n equals a,t,g, or c
  misc_feature (88): n equals a,t,g, or c
  misc_feature (99): n equals a,t,g, or c
  misc_feature (145): n equals a,t,g, or c
  misc_feature (150): n equals a,t,g, or c
  misc_feature (164): n equals a,t,g, or c
  misc_feature (168): n equals a,t,g, or c
aaaagattggactaagacactggccataccactggacagggttatgttaacacctgaaattgctgggtcttgagagancccaacgcanttctgggaganggaccacattggggggtaggtccacgggcttggtgatagaattatntctcnatcgacttcttgantgcnatatgaactgtaacatttgcttag

SEQ ID NO: 416 - DNA, 439 bp, Homo sapiens
  misc_feature (7): n equals a,t,g, or c
  misc_feature (9): n equals a,t,g, or c
  misc_feature (64): n equals a,t,g, or c
  misc_feature (406): n equals a,t,g, or c
  misc_feature (417): n equals a,t,g, or c
  misc_feature (421): n equals a,t,g, or c
  misc_feature (431): n equals a,t,g, or c
  misc_feature (434): n equals a,t,g, or c
gcgagantncgacagaagggtacggctgcgagagacgacagaagggtacggctgcgagaagacnacagaagggtacggctgcgagaagacgacagaagggtacggctgcgagaagacgacagaagggtacggctgcgagaagacgacagaaggtacggctgcgagaagacgacagaaggatacggctgcgagaagacgacagaagggagaatcttagttcaactttaaatttgcccacagaaccctctaaatccccttgtaaatttaactgttagtccaaagaggaacagctctttggacactaggaaaaaaccttgtagagagagtaaaaaatttaacacccatagtaggcctaaaagcagccaccaattaagaaagcgttcaaagctcaacacccactacccanaaaataaaaanaaanaaaaacccgnggnccgct

SEQ ID NO: 417 - DNA, 155 bp, Homo sapiens
  misc_feature (9): n equals a,t,g, or c
  misc_feature (84): n equals a,t,g, or c
  misc_feature (122): n equals a,t,g, or c
  misc_feature (123): n equals a,t,g, or c
  misc_feature (143): n equals a,t,g, or c
  misc_feature (153): n equals a,t,g, or c
gacatcttnttggtttttattttgaaacaatttttaggcttgttccgggggtctctgtgctgcctgtactgtattgacctgttntataggtgcctttttattaaaaagaaaattcaaaaaannaaaaaaaaaattaataaaanaaaaaaaaanca

SEQ ID NO: 418 - DNA, 291 bp, Homo sapiens
  misc_feature (285): n equals a,t,g, or c
  misc_feature (286): n equals a,t,g, or c
  misc_feature (288): n equals a,t,g, or c
  misc_feature (289): n equals a,t,g, or c
  misc_feature (291): n equals a,t,g, or c
gaaaaaagaaatccatatcttaaagaaacagctttcaagtgcctttctgcagtttttcaggagcgcaagatagatttggaataggaataagctctagttcttaacaaccgacactcctacaagatttagaaaaaagtttacaacataatctagtttacagaaaaatcttgtgctagaatactttttaaaaggtattttgaataccattaaaactgcttttttttttccagcaagtatccaaccaacttggttctgcttcaataaatctttggaaaaactaatttnnannan

SEQ ID NO: 419 - protein, 340 aa, Homo sapiens
  SITE (2): Xaa equals any of the naturally occurring L-amino acids
  SITE (315): Xaa equals any of the naturally occurring L-amino acids
VXDWFLWYVKKCGGTTRIISTTNGGQERKFVGGSGQVSERIMDLLGDRVKLERPVIYIDQTRENVLVETLNHEMYEAKYVISAIPPTLGMKIHFNPPLPMMRNQMITRVPLGSVIKCIVYYKEPFWRKKDYCGTMIIDGEEAPVAYTLDDTKPEGNYAAIMGFILAHKARKLARLTKEERLKKLCELYAKVLGSLEALEPVHYEEKNWCEEQYSGGCYTTYFPPGILTQYGRVLRQPVDRIYFAGTETATHWSGYMEGAVEAGERAAREILHAMGKIPEDEIWQSEPESVDVPAQPITTTFLERHLPSVPGLLRXIGLTTIFSATALGFLAHKRGLLVRV

SEQ ID NO: 420 - protein, 111 aa, Homo sapiens
  SITE (48): Xaa equals any of the naturally occurring L-amino acids
TRDLVSFISGIRLYNLMLSVLRHKRQNVAYFRICFFIEVSGILSKIVXSRHCSLCSSGTSCPLLSLQATGNASVLVSWRKITWGEGTSCGKSKCRYEMRRLPQLKVDKSAL

SEQ ID NO: 421 - protein, 61 aa, Homo sapiens
  SITE (1): Xaa equals any of the naturally occurring L-amino acids
XIWCIICKESKMMSFPRGMNLRNAFDGDVSVTLCYSGSSNNSKANYSKCKIFLFPRFTFVW

SEQ ID NO: 422 - protein, 51 aa, Homo sapiens
THAYCSNLSFRLYDQWRAWMQKSHKTRNQHRTRGSCPRADGARREVLPDKL

SEQ ID NO: 423 - protein, 246 aa, Homo sapiens
  SITE (71): Xaa equals any of the naturally occurring L-amino acids
  SITE (101): Xaa equals any of the naturally occurring L-amino acids
  SITE (117): Xaa equals any of the naturally occurring L-amino acids
  SITE (147): Xaa equals any of the naturally occurring L-amino acids
TRNDMKADCILYYGFGDIFRISSMVVMENVGQQKLYEMVSYCQNISKCRRVLMAQHFDEVWNSEACNKMCXNCCKDSAFERKNITEYCRDLIKILKQAEGXGMEKLTPIGNWIDSWXGKGAAKLRVAGVVAPTLPREDLEKIIAHFXIQQYLKEDYSFTAYATISYLKIGPKANLLNNEAHAITMQVTKSTQNSFRAESSQTCHSEQGDKKMEEKNSGNFQKKAANMLQQSGSKNTGAKKRKIDDA

SEQ ID NO: 424 - protein, 109 aa, Homo sapiens
  SITE (77): Xaa equals any of the naturally occurring L-amino acids
DHWPRPEWLPCTSWRRASCLNHVNCHHLATPAPASALPPFPPSWSGGYRSLGPTLAPLSPASVCLTVFPPLPQLRCXPQAWCCLGGLGEGVCGGGRRVKTEARCQNGLE

SEQ ID NO: 425 - protein, 57 aa, Homo sapiens
  SITE (5): Xaa equals any of the naturally occurring L-amino acids
  SITE (49): Xaa equals any of the naturally occurring L-amino acids
GSETXKYLVEDKRLGLYTWLCTDLLSHIGNHHTLQGISFICKMQRLVLXNHTNFFVL

SEQ ID NO: 426 - protein, 99 aa, Homo sapiens
  SITE (96): Xaa equals any of the naturally occurring L-amino acids
FGTSGDGGGSKMAQAIFEALEGMDNQTVLAVQSLLDGQGAVPDPTGQSVNAPPAIQPLDDEDVFLCGKCKKQFNSLPAFMTHKREQCQGNAPALAXVSL

SEQ ID NO: 427 - protein, 55 aa, Homo sapiens [sequence omitted]

SEQ ID NO: 428 - protein, 54 aa, Homo sapiens
  SITE (41): Xaa equals any of the naturally occurring L-amino acids
HTLSNLEFAQKVEPCNDHVRAKLSWAKKRDEDDVPTVPSTXGEERLYNPFLRVA

SEQ ID NO: 429 - protein, 39 aa, Homo sapiens
RQTKVNLKETRSFEIIVWGFYKSNYCHLHPDSFKLLIHP

SEQ ID NO: 430 - protein, 133 aa, Homo sapiens
  SITE (81): Xaa equals any of the naturally occurring L-amino acids
  SITE (85): Xaa equals any of the naturally occurring L-amino acids
ARAPRVPPAPHTPSKMGKEKTHINIVVIGHVDSGKSTTTGHLIYKCGGIDKRTIEKFEKEAAEMGKGSFKYAWVLDKLKAXVSAXITIDISLWKFETTKYYITIIDAPGHRDFIKNMITGTSQADCAVLIVAA

SEQ ID NO: 431 - protein, 190 aa, Homo sapiens
LCWARPLPSGPVLLAANKDSSWCPTCLVHCCVNPGGSGHRRQPRPRVQEKCSLEARTTASHWGRRGPRTTSASYLPASARGPRDAVLFQPPALGRGHASRIQGAGGLSTARTCLLAAAAVGEHGGCQRLLWKVAASEMAGAAGVRLHTAQVSSGRLSWGGSSSAEGWWGVQSVILGAVCPTPAWGPHFRR

SEQ ID NO: 432 - protein, 310 aa, Homo sapiens
GPHGNGEVRWPLPPPPPRFVARRKMADLEEQLSDEEKVRIAAKFIIHAPPGEFNEVFNDVRLLLNNDNLLREGAAHAFAQYNLDQFTPVKIEGYEDQVLITEHGDLGNGKFLDPKNRICFKFDHLRKEATDPRPCEVENAVESWRTSVETALRAYVKEHYPNGVCTVYGKKIDGQQTIIACIESHQFQAKNFWNGRWRSEWKFTITPSTTQVVGILKIQVHYYEDGNVQLVSHKDIQDSLTVSNEVQTAKEFIKIVEAAENEYQTAISENYQTMSDTTFKALRRQLPVTRTKIDWNKILSYKIGKEMQNA

SEQ ID NO: 433 - protein, 289 aa, Homo sapiens
  SITE (287): Xaa equals any of the naturally occurring L-amino acids
  SITE (288): Xaa equals any of the naturally occurring L-amino acids
QSCTSGSSKPNSPSISPSILSNTEHKRGPEVTSQGVQTSSPACKQEKDDKEEKKDAAEQVRKSTLNPNAKEFNPRSFSQPKPSTTPTSPRPQAQPSPSMVGHQQPTPVYTQPVCFAPNMMYPVPVSPGVQPLYPIPMTPMPVNQAKTYRAGKVPNMPQQRQDQHHQSAMMHPASAAGPPIAATPPAYSTQYVAYSPQQFPNQPLVQHVPHYQSQHPHVYSPVIQGNARMMAPPTHAQPGLVSSSATQYGAHEQTHAMYACPKLPYNKETSPSFYFAISTGSLAQQYXXP

SEQ ID NO: 434 - protein, 147 aa, Homo sapiens
KVTPDLKPTEASSSAFRLMPALGVSVADQKGKSTVASSEAKPAATIRIVQGLGVMPPKAGQTITVATHAKQGASVASGSGTVHTSAVSLPSMNAAVSKTVAVASGAARPPSASAQEPPPCGRSLSAPRLCPRPRLGSCLHGSQFPSL

SEQ ID NO: 435 - protein, 151 aa, Homo sapiens
  SITE (9): Xaa equals any of the naturally occurring L-amino acids
  SITE (15): Xaa equals any of the naturally occurring L-amino acids
  SITE (79): Xaa equals any of the naturally occurring L-amino acids
GSGTKDPSXCNTQTXAHTHTGGEISLFSMSFFSWAETGYCPGQLPEKHRRELRSARPSSLAPGFGGPRTADRGWSWRLXSRAYTWRNAPPSSPSLQTWGWLGPEGCDEEKRASVGMRQEGIDFDCDLWGFLPALDNPAKDCFFLSLARRGP

SEQ ID NO: 436 - protein, 180 aa, Homo sapiens
  SITE (42): Xaa equals any of the naturally occurring L-amino acids
  SITE (123): Xaa equals any of the naturally occurring L-amino acids
APASPVMPPQTQSPGQPAQPAPMVPLHQKQSRITPIQKPRGXDPVEILQEREYRLQARIAHRIQELENLPGSLAGDLRTKATIELKALRLLNFQRQLRQEVVVCMRRDTALETALNAKAYKRXSASPCARPASLRSWRSSRRSSRSASAGRSTRNTSIAFSSMPRISRNITDPSQAKSRS

SEQ ID NO: 437 - protein, 415 aa, Homo sapiens
  SITE (8): Xaa equals any of the naturally occurring L-amino acids
  SITE (94): Xaa equals any of the naturally occurring L-amino acids
  SITE (96): Xaa equals any of the naturally occurring L-amino acids
  SITE (170): Xaa equals any of the naturally occurring L-amino acids
RKYLVPLXKKLYLKWALEEYLDEFDPCHCRPCQNGGLATVEGTHCLCHCKPYTFGAACEQGVLVGNQAGGVDGGWSCWSSWSPCVQGKKTRSRXCXNPPPSGGGRSCVGETTESTQCEDEELEHLRLLEPHCFPLSLVPTEFCPSPPALKDGFVQDEGTMFPVGKNVVYXCNEGYSLIGNPVARCGEDLRWLVGEMHCQKIACVLPVLMDGIQSHPQKPFYTVGEKVTVSCSGGMSLEGPSAFLCGSSLKWSPEMKNARCVQKENPLTQAVPKCQRWEKLQNSRCVCKMPYECGPSLDVCAQDERSKRILPLTVCKMHVLHCQGRNYTLTGRDSCTLPASAEKACGACPLWGKCDAESSKCVCREASECEEEGFSICVEVNGKEQTMSECEAGALRCRGQSISVTSIRPCAAETQ

SEQ ID NO: 438 - protein, 285 aa, Homo sapiens
  SITE (16): Xaa equals any of the naturally occurring L-amino acids
  SITE (17): Xaa equals any of the naturally occurring L-amino acids
  SITE (18): Xaa equals any of the naturally occurring L-amino acids
LIRLTIGKAGSLQYRXXXFPGMEAFLGSRSGLWAGGPAPGQFYRIPSTPDSFMDPASALYRGPITRTQNPMVTGTSVLGVKFEGGVVIAADMLGSYGSLARFRNISRIMRVNNSTMLGASGDYADFQYLKQVLGQMVIDEELLGDGHSYSPRAIHSWLTRAMYSRRSKMNPLWNTMVIGGYADGESFLGYVDMLGVAYEAPSLATGYGAYLAQPLLREVLEKQPVLSQTEARDLVERCMRVLYYRDARSYNRFQIATVTEKGVEIEGPLSTETNWDIAHMISGFE

SEQ ID NO: 439 - protein, 185 aa, Homo sapiens
NSAAHKKGKLPIVNEDDELVAIIARTDLKKNRDYPLASKDAKKQLLCGAAIGTHEDDKYRLDLLAQAGVDVVVLDSSQGNSIFQINMIKYIKDKYPNLQVIGGNVVTAAQAKNLIDAGVDALRVGMGSGSICITQEVLACGRPQATAVYKVSEYARRFGVPVIADGGIQNVGHIAKALALGAPQS

SEQ ID NO: 440 - protein, 211 aa, Homo sapiens
LQGRSTPIWPALATVTSRTPALGPQAGIDTNEIAPLEPDAPPDACEASFDAVSTIRGELFFFKAGFVWRLRGGQLQPGYPALASRHWQGLPSPVDAAFEDAQGHIWFFQGAQYWVYDGEKPVLGPAPLTELGLVRFPVHAALVWGPEKNKIYFFRGRDYWRFHPSTRRVDSPVPRRPLTGEGCPLRSTLPSRMLMAMPTSCAAASTGSLTL

SEQ ID NO: 441 - protein, 80 aa, Homo sapiens
  SITE (40): Xaa equals any of the naturally occurring L-amino acids
GGAGKLLSFTHSAPWSRLWSSLGKRVTGESQGLEKLPGTXDGLAALTQDPLPLPPPLCRNTGTPRGKMSFSRLQFSPRKL

SEQ ID NO: 442 - protein, 567 aa, Homo sapiens
  SITE (205): Xaa equals any of the naturally occurring L-amino acids
  SITE (212): Xaa equals any of the naturally occurring L-amino acids
  SITE (469): Xaa equals any of the naturally occurring L-amino acids
  SITE (503): Xaa equals any of the naturally occurring L-amino acids
  SITE (505): Xaa equals any of the naturally occurring L-amino acids
  SITE (517): Xaa equals any of the naturally occurring L-amino acids
  SITE (535): Xaa equals any of the naturally occurring L-amino acids
  SITE (546): Xaa equals any of the naturally occurring L-amino acids
NVHLYIMYYMEAKHAVSFMTCTQNVAPDMFRTIPPEANIPIPVKSDMVMMHEHHKETEYKDKIPLLQQPKREEEEVLDQGDFYSLLSKLLGEREDVVHVHKYNPTEKAESESDLVAEIANVVQKKDLGRSDAREGAEHERGNAILVRDRIHKFHRLVSTLRPPESRVFSLQQPPPGEGTWEPEHTGDFHMEEALDWPGVYLLPGXVSGVALXPKNNLVIFHRGDHVWDGNSFDSKFVYQQIGLGPIEEDTILVIDPNNAAVLQSSGKNLFYLPHGLSIDKDGNYWVTDVALHQVFKLDPNNKEGPVLILGRSMQPGSDQNHFCQPTDVAVDPGTGAIYVSDGYCNSRIVQFSPSGKFITQWGEESSGSSPLPGQFTVPHSLALVPLLGQLCVADRENGRIQCFKTDTKEFVREIKHSSFGRNVFAISYIPGLLFAVNGKPHFGDQEPVQGFVMNFSNGEIIDIFKPVRXLLDMPHDIVASEDGTVYIGRCSYQHRVGSSTLDXRXLGTSVQFKKGLXIEVQGNPKKPEGICCFPXTTLRVIPVVGXWRGHGPNLIPVGKNPRGPLGR

SEQ ID NO: 443 - protein, 129 aa, Homo sapiens
  SITE (123): Xaa equals any of the naturally occurring L-amino acids
  SITE (127): Xaa equals any of the naturally occurring L-amino acids
  SITE (129): Xaa equals any of the naturally occurring L-amino acids
RPSCSPGSVSAAAVNMEPPDAPAQARGAPRLLLLAVLLAAHPDAQAEVRLSVPPLVEVMRGKSVILDCTPTGTHDHYMLEWFLTDRSGARPRLASAEMQGSELQVTMHDTRGRSPPYQLGLPXGAWXLX

SEQ ID NO: 444 - protein, 131 aa, Homo sapiens [sequence omitted]

SEQ ID NO: 445 - protein, 405 aa, Homo sapiens
GTGLVPIRQSTKFDSSLDRKDKFSFDLGKGEVIKAWDIAIATMKVGEVCHITCKPEYAYGSAGSPPKIPPNATLVFEVELFEFKGEDLTEEEDGGIIRRIQTRGEGYAKPNEGAIVEVALEGYYKDKLFDQRELRFEIGEGENLDLPYGLERAIQRMEKGEHSIVYLKPSYAFGSVGKEKFQIPPNAELKYELHLKSFEKAKESWEMNSEEKLEQSTIVKERGTVYFKEGKYKQALLQYKKIVSWLEYESSFSNEEAQKAQALRLASHLNLAMCHLKLQAFSAAIESCNKALELDSNNEKGLFRRGEAHLAVNDFELARADFQKVLQLYPNNKAAKTQLAVCQQRIRRQLAREKKLYANMFERLAEEENKAKAEASSGDHPTDTEMKEEQKSNTAGSQSQVETEA

SEQ ID NO: 446 - protein, 232 aa, Homo sapiens
PLVPSSQKALLLELKGLQEEPVEGFRVTLVDEGDLYNWEVAIFGPPNTYYEGGYFKARLKFPIDYPYSPPAFRFLTKMWHPNIYETGDVCISILHPPVDDPQSGELPSERWNPTQNVRTILLSVISLLNEPNTFSPANVDASVMYRKWKESKGKDREYTDIIRKQVLGTRWTRVNGVKVPTTLAEYCVKTKAPAPDEGSDLFYDDYYEDGEVEEEADSCFGDDEDDSGTEES

SEQ ID NO: 447 - protein, 356 aa, Homo sapiens
  SITE (12): Xaa equals any of the naturally occurring L-amino acids
  SITE (53): Xaa equals any of the naturally occurring L-amino acids
  SITE (191): Xaa equals any of the naturally occurring L-amino acids
  SITE (263): Xaa equals any of the naturally occurring L-amino acids
CSPPPPPAAAAXAAAAAMAQYKGAASEAGRAMHLMKKREKQREQMEQMKQRIXEENIMKSNIDKKFSAHYDAVEAELKSSTVGLVTLNDMKAKQEALVKEREKQLAKKEQSKELQMKLEKLREKERKKEAKRKISSLSFTLEEEEEGGEEEEEAAMYEEEMEREEITTKKRKLGKNPDVDTSFLPDRDREXEENRLREELRQEWEAKQEKIKSEEIEITFSYWDGSGHRRTVKMRKGNTMQQFLQKALEILRKDFSELRSAGXEQLMYIKEDLIIPHHHSFYDFIVTKARGKSGPLFNFDVHDDVRLLSDATVEKDESHAGKVVLRSWYEKNKHIFPASRWEPYDPEKKWDKYTIR

SEQ ID NO: 448 - protein, 88 aa, Homo sapiens
KTHKMCDAFVGTWKLVSSENFDDYMKEVGVGFATRKVAGMAKPNMIISVNGDVITIKSESTFKNTEISFILGQEFDEALQMTGKSRAP

SEQ ID NO: 449 - protein, 171 aa, Homo sapiens
  SITE (72): Xaa equals any of the naturally occurring L-amino acids
  SITE (132): Xaa equals any of the naturally occurring L-amino acids
LILVLMFVVWMKRRDKERQAKQLLIDPEDDVRDNILKYDEEGGGEEDQDYDLSQLQQPDTVEPDAIKPVGIXRMDERPIHAEPQYPVRSAAPHPGDIGDFINEGLKAADNDPTAPPYDSLLVFDYEGSGSTXGSLSSLNSSSSGGEQDYDYLNDWGPRFKKLADMYGGGDD

SEQ ID NO: 450 - protein, 34 aa, Homo sapiens
KVKACCKDIFFLLLEGNTKRKISFFHGAFDNFSL

SEQ ID NO: 451 - protein, 148 aa, Homo sapiens
  SITE (43): Xaa equals any of the naturally occurring L-amino acids
  SITE (89): Xaa equals any of the naturally occurring L-amino acids
RTLHPATGPRARPPRGWRRRLCAQGPAPDWDPGVPPGLASCGXTVWLHFSDPSLGRKVKETGPASAFGLWFLDRVLSPSPPSSPNLSHXRPLPAAPSLLGIGSPEPPSPEPPTPLPGPCGCWASHLKEGKVVQPEPVEQCPVWPPKPK

SEQ ID NO: 452 - protein, 83 aa, Homo sapiens
  SITE (19): Xaa equals any of the naturally occurring L-amino acids
  SITE (28): Xaa equals any of the naturally occurring L-amino acids
  SITE (64): Xaa equals any of the naturally occurring L-amino acids
  SITE (77): Xaa equals any of the naturally occurring L-amino acids
  SITE (79): Xaa equals any of the naturally occurring L-amino acids
DSHRPRAMRALWVLGLSCXLLTFGSVRXDDEVDVDGTVEEDLGKSREGSRTDDEVVQREEEAIXVGWIKCIPNKRTXEXKSRK

SEQ ID NO: 453 - protein, 240 aa, Homo sapiens
  SITE (234): Xaa equals any of the naturally occurring L-amino acids
GWLPCGSSVVPATPGSPPSRFWLLPAMALRVLLLTALTLCHGFNLDTENAMTFQENARGFGQSVVQLQGSRVVVGAPQEIVAANQRGSLYQCDYSTGSCEPIHLQVPVEAVNMSLGLSLAATTSPPQLLACGPTVHQTCSENTYVKGLCFLFGSNLRQQPQKFPEALRGCPQEDSDIAFLIDGSGSIIPHDFRRMKEFVSTVMEQLKKSKTLFSLMQYSEEFRIHFTSKSSRTXLTQDHW

SEQ ID NO: 454 - protein, 244 aa, Homo sapiens
  SITE (206): Xaa equals any of the naturally occurring L-amino acids
  SITE (227): Xaa equals any of the naturally occurring L-amino acids
  SITE (229): Xaa equals any of the naturally occurring L-amino acids
  SITE (239): Xaa equals any of the naturally occurring L-amino acids
KWCSWTLLKIWEVTCTWKLPTLAKFSPYLGQMINLRRLLLSHIHASSYISPEKEEQYIAQFTSQFLSLQCLQLLYVDSLFFLRGRLDQLLRHVMNPLETLSITNCRLSEGDVMHLSQSPSVSQLSVLSLSGVMLTDVSPEPLQALLERASATLQDLVFDECGITDDQLLALLPSLSHCSQLTTLSFYGNSISISALQSLLQHLIGXSNLTHVLYPVPLESYEDIHGXLXLERLLSACQXQGVAV

SEQ ID NO: 455 - protein, 195 aa, Homo sapiens
HEGTQSFVFQREEIAQLARQYAGLDHELAFSRLIVELRRLHPGHVLPDEELQWVFVNAGGWMGAMCLLHASLSEYVLLFGTALGSRGHSGRYWAEISDTIISGTFHQWREGTTKSEVFYPGETVVHGPGEATAVEWGPNTWMVEYGRGVIPSTLAFALADTVFSTQDFLTLFYTLRSYARGLRLELTTYLFGQDP

SEQ ID NO: 456 - protein, 36 aa, Homo sapiens
LVTLLHAMQARDKTLGLATLCIGGGQGIAMVIERLN

SEQ ID NO: 457 - protein, 152 aa, Homo sapiens
  SITE (86): Xaa equals any of the naturally occurring L-amino acids
  SITE (114): Xaa equals any of the naturally occurring L-amino acids
VTAAASVRALQVTVAGLLLVFFLFGAPLDSLPSMKALSPVRGCYEAVCCLSERSLAIARGRGKGPAAEEPLSLLDDMNHCYSRLRXLVPGVPRGTQLSQVEILQRVIDYILDLXVVLAEPAPGPPDGPHLPIQTAELAPELVISNDKRSFCH

SEQ ID NO: 458 - protein, 31 aa, Homo sapiens
  SITE (17): Xaa equals any of the naturally occurring L-amino acids
  SITE (25): Xaa equals any of the naturally occurring L-amino acids
  SITE (31): Xaa equals any of the naturally occurring L-amino acids
LLNNFIFLETHYLWACXTWTIWPNXLDKKGX

SEQ ID NO: 459 - protein, 157 aa, Homo sapiens
  SITE (28): Xaa equals any of the naturally occurring L-amino acids
  SITE (72): Xaa equals any of the naturally occurring L-amino acids
  SITE (124): Xaa equals any of the naturally occurring L-amino acids
  SITE (130): Xaa equals any of the naturally occurring L-amino acids
DPRVRETTVKARARSQHAGGPELGLSQXYVTPRRPFEKSRLDQELKLIGEYGLRNKREVWRVKFTLAKIRKXARELLTLDEKDPRRLFEGNALLRRLVRIGVLDEGKMKLDYILGLKMRILGEXSADPGXSSWGWPIHPPCPVLIRQATQVRKQVVN

SEQ ID NO: 460 - protein, 136 aa, Homo sapiens
  SITE (119): Xaa equals any of the naturally occurring L-amino acids
  SITE (130): Xaa equals any of the naturally occurring L-amino acids
  SITE (135): Xaa equals any of the naturally occurring L-amino acids
IWAPFPHHQGSGSQVSSYGTGALKSHIMAAKAVANTMRTSLGPNGLDKMMVDKDGDVTVTNDGATILSMMDVDHQIAKLMVELSKSQDDEIGDGDHGGGCPGRRPAGRRPSSCWTAAFXRSGSPTVTSRXPALAXE

SEQ ID NO: 461 - protein, 390 aa, Homo sapiens
  SITE (11): Xaa equals any of the naturally occurring L-amino acids
  SITE (14): Xaa equals any of the naturally occurring L-amino acids
  SITE (375): Xaa equals any of the naturally occurring L-amino acids
  SITE (382): Xaa equals any of the naturally occurring L-amino acids
  SITE (383): Xaa equals any of the naturally occurring L-amino acids
  SITE (386): Xaa equals any of the naturally occurring L-amino acids
  SITE (387): Xaa equals any of the naturally occurring L-amino acids
CGNWWVPRAGXNWXRGSRFLFVDRCDRHLTMQIFVKTLTGKTITLEVEPSDTIENVKAKIQDKEGIPPDQQRLIFAGKQLEDGRTLSDYNIQKESTLHLVLRLRGGMQIFVKTLTGKTITLEVEPSDTIENVKAKIQDKEGIPPDQQRLIFAGKQLEDGRTLSDYNIQKESTLHLVLRLRGGMQIFVKTLTGKTITLEVEPSDTIENVKAKIQDKEGIPPDQQRLIFAGKQLEDGRTLSDYNIQKESTLHLVLRLRGGMQIFVKTLTGKTITLEVEPSDTIENVKAKIQDKEGIPPDQQRLIFAGKQLEDGRTLSDYNIQKESTLHLVLRLRGGMQIFVKTLTGKTITLEVEPSDTIENVKARSRQGRHPPDQQXLILLGKXXKWXXPFD

SEQ ID NO: 462 - protein, 171 aa, Homo sapiens
  SITE (74): Xaa equals any of the naturally occurring L-amino acids
  SITE (135): Xaa equals any of the naturally occurring L-amino acids
  SITE (142): Xaa equals any of the naturally occurring L-amino acids
  SITE (155): Xaa equals any of the naturally occurring L-amino acids
CSTVRIPGSTHASGLSRRASPVYLASMSGRGKTGGKARAKAKSRSSRAGLQFPVGRVHRLLRKGHYAERVGAGXPVYLAAVLEYLTAEILELAGNAARDNKKTRIIPRHLQLAIRNDEELNKLLGGVTIAQGRRXAQHPGRXCCPRRPAPPWGRXPFGGQERATKASQGVL

SEQ ID NO: 463 - protein, 433 aa, Homo sapiens
RVRAPPRPPLGPSRPSHHVHPLQLPGIREVTINQSLLAPLRLDADPSLQRVRQEESEQIKTLNNKFASFIDKVRFLEQQNKLLETKWTLLQEQKSAKSSRLPDIFEAQIAGLRGQLEALQVDGGRLEAELRSMQDVVEDFKNKYEDEINRRTAAENEFVVLKKDVDAAYMSKVELEAKVDALNDEINFLRTLNETELTELQSQISDTSVVLSMDNSRSLDLDGIIAEVKAQYEEMAKCSRAEAEAWYQTKFETLQAQAGKHGDDLRNTRNEISEMNRAIQRLQAEIDNIKNQRAKLEAAIAEAEERGELALKDARAKQEELEAALQRAKQDMARQLREYQELMSVKLALDIEIATYRKLLEGEESRLAGDGVGAVNISVMNSTGGSSSGGGIGLTLGGTMGSNALSFSSSAGPGLLKAYSIRTASASRRSARD

SEQ ID NO: 464 - protein, 121 aa, Homo sapiens
  SITE (50): Xaa equals any of the naturally occurring L-amino acids
  SITE (64): Xaa equals any of the naturally occurring L-amino acids
  SITE (110): Xaa equals any of the naturally occurring L-amino acids
  SITE (114): Xaa equals any of the naturally occurring L-amino acids
  SITE (115): Xaa equals any of the naturally occurring L-amino acids
  SITE (117): Xaa equals any of the naturally occurring L-amino acids
GSGCVFAILGRRCSRPWRIWPGEPLQRAPPAAGTRWPHGHRSSPVGTPGXAPNVPAIWQQPLWXEYSCEYGSMKFYALCGFGGVLSCGLTHTAVVPLDLVKCRMQVDPQXYKGXXNXILIN

SEQ ID NO: 465 - protein, 68 aa, Homo sapiens
RIPAPASSRHSGGRCAAGPRGPPATASRALRAVHRPLDAARGRTGSTSHLCSSSYTIGCLLWFSQKAM

SEQ ID NO: 466 - protein, 224 aa, Homo sapiens
ATILEREAEQSRLGATERAAAAAMNPEYDYLFKLLLIGDSGVGKSCLLLRFADDTYTESYISTIGVDFKIRTIELDGKTIKLQIWDTAGQERFRTITSSYYRGAHGIIVVYDVTDQESYANVKQWLQEIDRYASENVNKLLVGNKSDLTTKKVVDNTTAKEFADSLGIPFLETSAKNATNVEQAFMTMAAEIKKRMGPGAASGGERPNLKIDSTPVKPAGGGCC

SEQ ID NO: 467 - protein, 76 aa, Homo sapiens
SEAPGESVGTTPEAQMKTGPFAEHSNQLWNISAVPSWSKVNQGLIRMYKAECLEKFPVIQHFKFGSLLPIHPVTSG

SEQ ID NO: 468 - protein, 111 aa, Homo sapiens
  SITE (31): Xaa equals any of the naturally occurring L-amino acids
  SITE (35): Xaa equals any of the naturally occurring L-amino acids
  SITE (47): Xaa equals any of the naturally occurring L-amino acids
  SITE (49): Xaa equals any of the naturally occurring L-amino acids
  SITE (78): Xaa equals any of the naturally occurring L-amino acids
  SITE (97): Xaa equals any of the naturally occurring L-amino acids
SLARTGPRSLARPCRRRPAHRHPLQPCPPGXCPRXPTADVRRPRHRXRXELHAHNVTSPPAPTAWAAPAPQHQPQPLXLVPGRRVCSRLLPRCACGXCCPGVALAGRIPWN

SEQ ID NO: 469 - protein, 459 aa, Homo sapiens
PRVRPRVRPRVRLSSPSPVCLPPAAATMTTSIRQFTSSSSIKGSSGLGGGSSRTSCRLSGGLGAGSCRLGSAGGLGSTLGGSSYSSCYSFGSGGGYGSSFGGVDGLLAGGEKATMQNLNDRLASYLDKVRALEEANTELEVKIRDWYQRQAPGPARDYSQYYRTIEELQNKILTATVDNANILLQIDNARLAADDFRTKFETEQALRLSVEADINGLRRVLDELTLARADLEMQIENLKEELAYLKKNHEEEMNALRGQVGGEINVEMDAAPGVDLSRILNEMRDQYEKMAEKNRKDAEDWFFSKTEELNREVATNSELVQSGKSEISELRRTMQALEIELQSQLSMKASLEGNLAETENRYCVQLSQIQGLIGSVEEQLAQLRCEMEQQNQEYKILLDVKTRLEQEIATYRRLLEGEDAHLTQYKKEPVTTRQVRTIVEEVQDGKVISSREQVHQTTR

SEQ ID NO: 470 - protein, 158 aa, Homo sapiens
  SITE (158): Xaa equals any of the naturally occurring L-amino acids
PPPPPPPELCSMASRRMETKPVITCLKTLLIIYSFVFWITGVILLAVGVWGKLTLGTYISLIAENSTNAPYVLIGTGTTIVVFGLFGCFATCRGSPWMLKLYAMFLSLVFLAELVAGISGFVFRHEIKDTFLRTYTDAMQTYNGNDERSRAVDHVQRX

SEQ ID NO: 471 - protein, 59 aa, Homo sapiens
VLFFYECPNLCFPLPSQTVWPVESVWFVFISPSFLEQGLRPCHISYALHPRLFWTLKVD

SEQ ID NO: 472 - protein, 320 aa, Homo sapiens
  SITE (48): Xaa equals any of the naturally occurring L-amino acids
  SITE (49): Xaa equals any of the naturally occurring L-amino acids
  SITE (53): Xaa equals any of the naturally occurring L-amino acids
  SITE (105): Xaa equals any of the naturally occurring L-amino acids
DPDEVFPVCLPLTGDAGEDGGKMLHLPEWPEQPPGGPAALQVRGAEDXXLSFXDCESLQAVFDPASCPHMLRAPARVLGEAVLPFSPALAEVTLGIGRGAGSSWXYHEEEADSTAKAMVTEMCLGEEDFQQLQAQEGVAITFCLKEFRGLLSFAESANLNLSIHFDAPGRPAIFTIKDSLLDGHFVLATLSDTDSHSQDLGSPERHQPVPQLQAHSTPHPDDFANDDIDSYMIAMETTIGNEGSRVLPSISLSPGPQPPKSPGPHSEEEDEAEPSTVPGTPPPKKFRSLFFGSILAPVRSPQGPSLCWRKTVRVKAEPRT

SEQ ID NO: 473 - protein, 331 aa, Homo sapiens
  SITE (24): Xaa equals any of the naturally occurring L-amino acids
  SITE (283): Xaa equals any of the naturally occurring L-amino acids
  SITE (299): Xaa equals any of the naturally occurring L-amino acids
  SITE (324): Xaa equals any of the naturally occurring L-amino acids
PPCAVPGPRLSPKLRTPSNSRESXICVSGRAEALTFRHGAEGSDRRRQRREGVLGPALLCRPWEVLGAHEVPSRNIFSEQTIPPSAKYGGRHTVTMIPGDGIGPELMLHVKSVFRHACVPVDFEEVHVSSNADEEDIRNAIMAIRRNRVALKGNIETNHNLPPSHKSRNNILRTSLDLYANVIHCKSLPGVVTRHKDIDILIVRENTEGEYSSLEHESVAGVVESLKIITKAKSLRIAEYAFKLAQESGRKKVTAVHKANIMKLGDGLFLQCCREVAARYPQXTFENMIVDNTTMQLVXRPQQFDVMVMPNLYGNIVKQCLRGXGRGPKLV

SEQ ID NO: 474 - protein, 30 aa, Homo sapiens
TPISTKNTKISQARWRAHVVPATREADAEE

SEQ ID NO: 475 - protein, 124 aa, Homo sapiens
  SITE (110): Xaa equals any of the naturally occurring L-amino acids
TQFSLSPVETIYTILCINVYTLPICIHIYIVYILYMYRCVYVHIYTHAHNKIRCSLQIQMLITKPDATQTAAEETRLDSCNRSQKIKTATCSDFGHFCMFIKNGFVTRKXRTSVSEKGRWGEPS

SEQ ID NO: 476 - protein, 64 aa, Homo sapiens
NGYLVFPRKNSFLLIFGLFVYLETNLDSLPLVDTHSKRTLLIKTVETRDGQVINETSQHHDDLE

SEQ ID NO: 477 - protein, 107 aa, Homo sapiens
VLTVDARNHGDSPHSPDMSYEIMSQDLQDLLPQLGLVPCVVVGHSMGGKTAMLLALQRPELVERLIAVDISPVESTGVSHFATYVAAMRAINIADRLAPLPCPKTGG

SEQ ID NO: 478 - protein, 282 aa, Homo sapiens
  SITE (281): Xaa equals any of the naturally occurring L-amino acids
RELGGTLLSAIEVEGAKMQSNKTFNLEKQNHTPRKHHQHHHQQQHHQQQQQQPPPPPIPANGQQASSQNEGLTIDLKNFRKPGEKTFTQRSRLFVGNLPPDITEEEMRKLFEKYGKAGEVFIHKDKGFGFIRLETRTLAEIAKVELDNMPLRGKQLRVRFACHSASLTVRNLPQYVSNELLEEAFSVFGQVERAVVIVDDRGRPSGKGIVEFSGKPAARKALDRCSEGSFLLTTFPRPVTVEPMDQLDDEEGLPEKLVIKNQQFHKEREQPPRFAQPGSFXV

SEQ ID NO: 479 - protein, 289 aa, Homo sapiens
  SITE (206): Xaa equals any of the naturally occurring L-amino acids
  SITE (215): Xaa equals any of the naturally occurring L-amino acids
  SITE (218): Xaa equals any of the naturally occurring L-amino acids
  SITE (285): Xaa equals any of the naturally occurring L-amino acids
AVPVRNSRVDPRVRVCGPLSAPRGSRRPTVPGTPACLARPAAQGFSAALPVRWTGRRAGPSRPVPIGTPSRAADPSQGEMSADAAAGAPLPRLCCLEKGPNGYGFHLHGEKGKLGQYIRLVEPGSPAEKAGLLAGDRLVEVNGENVEKETHQQVVSRIRAALNAVRLLVVDPETDEQLQKLGVQVREELLRAQEAPGQAEPPAAAXVQGAGNENXPRXADKSHPEQRELRPRLCTMKKGPSGYGFNLHSDKSKPGQFIRSVDPDSPAEASGLRAQDRIVEVMLLXSLPI

SEQ ID NO: 480 - protein, 44 aa, Homo sapiens
GSTHASGRNEGPPAKTKSWVGPTLHFHRKSEHLVGLKVLCCFRL

SEQ ID NO: 481 - protein, 124 aa, Homo sapiens
  SITE (3): Xaa equals any of the naturally occurring L-amino acids
  SITE (5): Xaa equals any of the naturally occurring L-amino acids
  SITE (8): Xaa equals any of the naturally occurring L-amino acids
  SITE (9): Xaa equals any of the naturally occurring L-amino acids
  SITE (10): Xaa equals any of the naturally occurring L-amino acids
SIXHXRKXXXTVRSDSRVDPRSDDFTPLEILWTFSIYLESVAILPQLFMVSKTGEAETITSHYLFALGVYRTLYLFNWIWRYHFEGFFDLIAIVAGLVQTVLYCDFFYLYITKVLKGKKLSLPA

SEQ ID NO: 482 - protein, 131 aa, Homo sapiens
  SITE (122): Xaa equals any of the naturally occurring L-amino acids
  SITE (124): Xaa equals any of the naturally occurring L-amino acids
  SITE (127): Xaa equals any of the naturally occurring L-amino acids
  SITE (131): Xaa equals any of the naturally occurring L-amino acids
CSSRGAHHSHCDRLPHSPWPGLREVELLASVHTEQMEEELALGPRGQGGASLAGRDGRSAGAGSYGALANSAWGGPRKVASASAAASTLSEPPRRTQESRTRTRALGLPTLPMEKLAASNRXPXGLXGPGX

SEQ ID NO: 483 - protein, 221 aa, Homo sapiens
  SITE (168): Xaa equals any of the naturally occurring L-amino acids
  SITE (174): Xaa equals any of the naturally occurring L-amino acids
KKPPITHPSTPAEETYNLGRQVLPLSAVTYFQKSGPGLLPAPATQSASVAGTLQNSLCSQVTKKKRANMLVLLAGIFVVHIATVIMLFVSTIANVWLVSNTVDASVGLWKNCTNISCSDSLSYASEDALKTVQAFMILSIIFCVIALLVFVFQLFTMEKGNRFFLSGXTTLVCXLCILVGCPSTLVIMRIVMERICTTAIPTSWAGSASASASSSAFSIWS

SEQ ID NO: 484 - protein, 382 aa, Homo sapiens
  SITE (22): Xaa equals any of the naturally occurring L-amino acids
  SITE (54): Xaa equals any of the naturally occurring L-amino acids
  SITE (69): Xaa equals any of the naturally occurring L-amino acids
  SITE (287): Xaa equals any of the naturally occurring L-amino acids
  SITE (298): Xaa equals any of the naturally occurring L-amino acids
  SITE (324): Xaa equals any of the naturally occurring L-amino acids
  SITE (358): Xaa equals any of the naturally occurring L-amino acids
TKLWTLVSNPDTDALICWSPSXNSFHVFDQGQFAKEVLPKYFKHNNMASFVRQXNMYGFRKVVHIEQGXLVKPERDDTEFQHPCFLRGQEQLLENIKRKVTSVSTLKSEDIKIRQDSVTKLLTDVQLMKGKQECMDSKLLAMKHENEALWREVASLRQKHAQQQKVVNKLIQFLISLVQSNRILGVKRKIPLMLNDSGSAHSMPKYSRQFSLEHVHGSGPYSAPSPAYSSSSLYAPDAVASSGPIISDITELAPASPMASPGGSIDERPLSSSPLVRVKEEPPSPPXSPRVEEASPGXPSSVDTLLSPTALIDSILRESEPAPXSVTALTDARGHTDTEGRPPSPPPTSTPEKCLSVXAWTRMSSVTTWMLWTPTWITCRPC

SEQ ID NO: 485 - protein, 416 aa, Homo sapiens
  SITE (399): Xaa equals any of the naturally occurring L-amino acids
PSVANVGSHCDLSLKIPEISIQDMTAQVTSPSGKTHEAEIVEGENHTYCIRFVPAEMGTHTVSVKYKGQHVPGSPFQFTVGPLGEGGAHKVRAGGPGLERAEAGVPAEFSIWTREAGAGGLAIAVEGPSKAEISFEDRKDGSCGVAYVVQEPGDYEVSVKFNEEHIPDSPFVVPVASPSGDARRLTVSSLQESGLKVNQPASFAVSLNGAKGAIDAKVHSPSGALEECYVTEIDQDKYAVRFIPRENGVYLIDVKFNGTHIPGSPFKIRVGEPGHGGDPGLVSAYGAGLEGGVTGNPAEFVVNTSNAGAGALSVTIDGPSKVKMDCQECPEGYRVTYTPMAPGSYLISIKYGGPYHIGGSPFKAKVTGPRLVSNHSLHETSSVFVDSLTKATCAPQHGXPGPGPADASKVVAKGWG

SEQ ID NO: 486 - protein, 46 aa, Homo sapiens
FVTSGKISLYVYILTIRLDTNKATLLTASGELILFLIFFNKDILRY

SEQ ID NO: 487 - protein, 162 aa, Homo sapiens
LGVALGAVPKLHLGVLVSTGLRTAVGSPRLPPTALGAAYGTAKSGTGIAAMSVMRPEQIMKSIIPVVMAGIIAIYGLVVAVLIANSLNDDISLYKSFLQLGAGLSVGLSGLAAGFAIGIVGDAGVRGTAQQPRLFVGMILILIFAEVLGLYGLIVALILSTK

SEQ ID NO: 488 - protein, 114 aa, Homo sapiens
  SITE (95): Xaa equals any of the naturally occurring L-amino acids
  SITE (111): Xaa equals any of the naturally occurring L-amino acids
  SITE (113): Xaa equals any of the naturally occurring L-amino acids
QALRPGSFRGTGRKRERERERMSLSDWHLAVKLADQPLAPKSILQLPESELGEYSLGGYSISFLKQLIAGKLQESVPDPELIDLIYCGRKLKDDXTLTSTVFNLAPHPCSXEXL

SEQ ID NO: 489 - protein, 149 aa, Homo sapiens
  SITE (121): Xaa equals any of the naturally occurring L-amino acids
  SITE (142): Xaa equals any of the naturally occurring L-amino acids
STHASEDVLAAPSGCRASRPPTSGREQFWARGLAAADMTKGLVLGIYSKDKEDDVPQFTSAGENFDKLVSGKLREILNISGPPLKAGKTRTFYGLHEDFPSVVVVGLGRKAAGVDDQENWXEGKENIRVAMQRGAGRFQDLXISSVEGG

SEQ ID NO: 490 - protein, 527 aa, Homo sapiens
  SITE (311): Xaa equals any of the naturally occurring L-amino acids
RRRSRGLIPGRAPGRRRPRAHEVARAPPPIAMDRMKKIKRQLSMTLRGGRGIDKTNGAPEQIGLDESGGGGGSDPGEAPTRAAPGELRSARGPLSSAPEIVHEDLKMGSDGESDQASATSSDEVQSPVRVRMRNHPPRKISTEDINKRLSLPADIRLPEGYLEKLTLNSPIFDKPLSRRLRRVSLSEIGFGKLETYIKLDKLGEGTYATVYKGKSKLTDNLVALKEIRLEHEEGAPCTAIREVSLLKDLKHANIVTLHDIIHTEKSLTLVFEYLDKDLKQYLDDCGNIINMHNVKLFLFQLLRGLAYCHRXKVLHRDLKPQNLLINERGELKLADFGLARAKSIPTKTYSNEVVTLWYRPPDILLGSTDYSTQIDMWGVGCIFYEMATGRPLFPGSTVEEQLHFIFRILGTPTEETWPGILSNEEFKTYNYPKYRAEALLSHAPRLDSDGADLLTKLLQFEGRNRISAEDAMKHPFFLSLGERIHKLPDTTSIFALKEIQLQKEASLRSSSMPDSGRPAFRVVDTEF

SEQ ID NO: 491 - protein, 125 aa, Homo sapiens
  SITE (125): Xaa equals any of the naturally occurring L-amino acids
CTRAHPKNLVEKGILTTEKQNFLLFDMTTHPVTNTTEKQRLVKKLQDSVLERWVNDPQRMDKRTLALLVLAHSSDVLENVFSSLTDDKYDVAMNRAKDLVELDPEVEGTKPSATEMIWAVLAAFX

SEQ ID NO: 492 - protein, 53 aa, Homo sapiens
  SITE (3): Xaa equals any of the naturally occurring L-amino acids
  SITE (49): Xaa equals any of the naturally occurring L-amino acids
  SITE (51): Xaa equals any of the naturally occurring L-amino acids
VSXSILALLFNTDALFSRVYESLSDNHGLQEQTVEKLFFQWKSWVQEMXGXLK

SEQ ID NO: 493 - protein, 82 aa, Homo sapiens
  SITE (60): Xaa equals any of the naturally occurring L-amino acids
  SITE (67): Xaa equals any of the naturally occurring L-amino acids
  SITE (68): Xaa equals any of the naturally occurring L-amino acids
  SITE (78): Xaa equals any of the naturally occurring L-amino acids
  SITE (79): Xaa equals any of the naturally occurring L-amino acids
PGFFFQMLVHTYSSMDRHDGVPSHSSRLSQLGSVSQGPYSSAPPLSHTPSSDFQPPYFPXPYQPLPXXQSQDPYSHVXXPYP

SEQ ID NO: 494 - protein, 290 aa, Homo sapiens
YKDWLTKMSGKHDVGAYMLMYKGANRTETVTSFRKRESKVPADLLKRAFVRMSTSPEAFLALRSHFASSHALICISHWILGIGDRHLNNFMVAMETGGVIGIDFGHAFGSATQFLPVPELMPFRLTRQFINLMLPMKETGLMYSIMVHALRAFRSDPGLLTNTMDVFVKEPSFDWKNFEQKMLKKGGSWIQEINVAEKNWYPRQKICYAKRKLAGANPAVITCDELLLGHEKAPAFRDYVAVARGSKDHNIRAQEPESGLSEETQVKCLMDQATDPNILGRTWEGWEPWM

SEQ ID NO: 495 - protein, 156 aa, Homo sapiens
  SITE (148): Xaa equals any of the naturally occurring L-amino acids
CQSHPLPGGPACPCLACHITLLFGRPWLIKEVLVVSQAKWNLETVKKVQITLNCIQEVHFFPIVRGSWSLRDARLESDYIIIQNGNSQGNAFFHFIRFFYPHCTPSPSPLPIWMASQKLGPSPPCLGGGQSPLTAEAALLSSAVLPLXKCLQRVMS

SEQ ID NO: 496 - protein, 251 aa, Homo sapiens
  SITE (42): Xaa equals any of the naturally occurring L-amino acids
EELLRAQEAPGQAEPPAAAEVQGAGNENEPREADKSHPEQRXLRPRLCTMKKGPSGYGFNLHSDKSKPGQFIRSVDPDSPAEASGLRAQDRIVEVNGVCMEGKQHGDVVSAIRAGGDETKLLVVDRETDEFFKKCRVIPSQEHLNGPLPVPFTNGEIQKENSREALAEAALESPRPALVRSASSDTSEELNSQDSPPKQDSTAPSSTSSSDPILDFNISLAMAKERAHQKRSSKRAPQMDWSKKNELFSNL

SEQ ID NO: 497 - protein, 48 aa, Homo sapiens
NGAEAVSTEAKMTAFPDWPWLFHTLCDPCPMTLWLTLPEAMTTAAFCH

SEQ ID NO: 498 - protein, 373 aa, Homo sapiens
  SITE (337): Xaa equals any of the naturally occurring L-amino acids
  SITE (372): Xaa equals any of the naturally occurring L-amino acids
GTRGSRASGVCARGCLDSAGPWTMSRALRPPLPPLCFFLLLLAAAGARAGGYETCPTVQPNMLNVHLLPHTHDDVGWLKTVDQYFYGIKNDIQHAGVQYILDSVISALLADPTRRFIYVEIAFFSRWWHQQTNATQEVVRDLVRQGRLEFANGGWVMNDEAATHYGAIVDQMTLGLRFLEDTFGNDGRPRVAWHIDPFGHSREQASLFAQMGFDGFFFGRLDYQDKWVRMQKLEMEQVWRASTSLKPPTADLFTGVLPNGYNPPRNLCWDVLCVDQPLVEDPRSPEYNAKELVDYFLNVATAQGRYYRTNHTVMTMGSDFQYENANMWFKNLDKLIXLVNAQGKRKQCPCSLLHPRLLPLGAEQGQPHLVSXT

SEQ ID NO: 499 - protein, 238 aa, Homo sapiens
ALPGPDWHGAGAADRGPAAPPRPGPCAYAAHGRGALAEAARRCLHDIALAHRAATAARPPAPPPAPQPPSPTPSPPRPTLAREDNEEDEDEPTETETSGEQLGISDNGGLFVMDEDATLQDLPPFCESDPESTDDGSLSEETPAGPPTCSVPPASALPTQQYAKSLPVSVPVWGFKEKRTEARSSDEENGPPSSPDLDRIAASMRALVLREAEDTQVFGDLPRPRLNTSDFQKLKRKY

SEQ ID NO: 500 - protein, 198 aa, Homo sapiens
  SITE (94): Xaa equals any of the naturally occurring L-amino acids
  SITE (156): Xaa equals any of the naturally occurring L-amino acids
NSAELSPGLCSPTPTEARAGDAGPAARSRKQNPQSPPCCCVDDTWAQAEVGPVTSCTGFVEGSSRTGGMGSACIKVTKYFLFLFNLIFFILGAXILGFGVWILADKSSFISVLQTSSSSLRMGAYVFIGVGAVTMLMGFLGCIGAVNEVRCLLGLXFAFLLLILIAQVTAGALFYFNMGKVSPSLPPSSLGWTNHGGD

SEQ ID NO: 501 - protein, 169 aa, Homo sapiens
  SITE (165): Xaa equals any of the naturally occurring L-amino acids
SSASTNMSRGSSAGFDRHITIFSPEGRLYQVEYAFKAINQGGLTSVAVRGKDCAVIVTQKKVPDKLLDSSTVTHLFKITENIGCVMTGMTADSRSQVQRARYEAANWKYKYGYEIPVDMLCKRIADISQVYTQNAEMRPLGCCMILIGIDEEQGPQVYKCDPAGXYCGV

SEQ ID NO: 502 - protein, 507 aa, Homo sapiens
  SITE (10): Xaa equals any of the naturally occurring L-amino acids
  SITE (361): Xaa equals any of the naturally occurring L-amino acids
  SITE (461): Xaa equals any of the naturally occurring L-amino acids
VRQLCRPAEXDSVMAEQVALSRTQVCGILREELFQGDAFHQSDTHIFIIMGASGDLAKKKIYPTIWWLFRDGLLPENTFIVGYARSRLTVADIRKQSEPFFKATPEEKLKLEDFFARNSYVAGQYDDAASYQRLNSHMNALHLGSQANRLFYLALPPTVYEAVTKNIHESCMSQIGWNRIIVEKPFGRDLQSSDRLSNHISSLFREDQIYRIDHYLGKEMVQNLMVLRFANRIFGPIWNRDNIACVILTFKEPFGTEGRGGYFDEFGIIRDVMQNHLLQMLCLVAMEKPASTNSDDVRDEKVKVLKCISEVQANNVVLGQYVGNPDGEGEATKGYLDDPTVPRGSTTATFAAVVLYVENEXWDGVPFILRCGKALNERKAEVRLQFHDVAGDIFHQQCKRNELVIRVQPNEAVYTKMMTKKPGMFFNPEESELDLTYGNRYKNVKLPDAYERLILDVFCGXQMHFVRRTSSVRPGVFSPHCCTRLSWRSPSPSPIFMAAEAPRRQTS

SEQ ID NO: 503 - protein, 260 aa, Homo sapiens
  SITE (69): Xaa equals any of the naturally occurring L-amino acids
GPEVLPEPRVPREALAFIIRSFGGEVSWDKSLCIGATYDVTDSRITHQIVDRPGQQTSVIGRCYVQPQXVFDSVNARLLLPVAEYFSGVQLPPHLSPFVTEKEGDYVPPEKLKLLALQRGEDPGNLNESEEEEEEDDNNEGDGDEEGENEEEEEDAEAGSEKEEEARLAALEEQRMEGKKPRVMAGTLKLEDKQRLAQEEESEAKRLAIMMMKKREKYLYQKIMFGKRRKIREANKLAEKRKAHDEAVRSEKKAKKARPE

SEQ ID NO: 504 - protein, 424 aa, Homo sapiens
  SITE (292): Xaa equals any of the naturally occurring L-amino acids
  SITE (342): Xaa equals any of the naturally occurring L-amino acids
LLQRCYAFPGHRLAHSGSDLSLLVPEIEDMYSSPYLRPSESPITVEVNCTNPGTRYCWMSTGLYIPGRQIIEVSLPEAAASADLKIQIGCHTDDLTRASKLFRGPLVINRCCLDKPTKSITCLWGGLLYIIVPQNSKLGSVPVTVKGAVHAPYYKLGETTLEEWKRRIQENPGPWGELATDNIILTVPTANLRTLENPEPLLRLWDEVMQAVARLGAEPFPLRLPQRIVADVQISVGWMHAGYPIMCHLESVQELINEKLIRTKGLWGPVHELGRNQQRQEWEFPPHTTEAXCNLWCVYVHETVLGIPRSRANIALWPPVREKRVRIYLSKGPNVKNWNAWXALETYLQLQEAFGWEPFIRLFTEYRNQTNLPTENVDKMNLWVKMFSHQVQKNLAPFFEAWAGPSRRKWLPAWPICLNGRKIL

SEQ ID NO: 505 - protein, 70 aa, Homo sapiens
  SITE (49): Xaa equals any of the naturally occurring L-amino acids
  SITE (54): Xaa equals any of the naturally occurring L-amino acids
  SITE (66): Xaa equals any of the naturally occurring L-amino acids
  SITE (70): Xaa equals any of the naturally occurring L-amino acids
LHQSLLHLEKTNERKSIFLIHYPNNNRTPYRNYYHYVSKHYIPITYPTXSIIDXISIPTMISALNXQNKX

SEQ ID NO: 506 - protein, 434 aa, Homo sapiens
  SITE (69): Xaa equals any of the naturally occurring L-amino acids
  SITE (135): Xaa equals any of the naturally occurring L-amino acids
  SITE (363): Xaa equals any of the naturally occurring L-amino acids
STHASAHASVSTAAAAALAAAAVKAKHLAAVEERKIKSLVALLVETQMKKLEIKLRHFEELETIMDREXEALEYQRQQLLADRQAFHMEQLKYAEMRARQQHFQQMHQQQQQPPPALPPGSQPIPPTGAAGPPAXHGLAVAPASVVPAPAGSGAPPGSLGPSEQIGQAGSTAGPQQQQPAGAPQPGAVPPGVPPPGPHGPSPFPNQQTPPSMMPGAVPGSGHPGVAGNAPLGLPFGMPPPPPPPAPSIIPFGSLADSISINLPAPPNLHGHHHHLPFAPGTLPPPNLPVSMANPLHPNLPATTTMPSSLPLGPGLGSAAAQSPAIVAAVQGNLLPSASPLPDPGTPLPPDPTAPSPRHGHPCXHLHSEEPARHLSPSPPVDITVPGTALPPPLGPSPAWRVHHYVRKAPSAPPKPSPCLTEACIFISDYSRTSV

SEQ ID NO: 507 - protein, 303 aa, Homo sapiens
  SITE (165): Xaa equals any of the naturally occurring L-amino acids
  SITE (280): Xaa equals any of the naturally occurring L-amino acids
EYVFPAKKKLQEYRVLITTLITAGSWSRPSFPLITSHTSSSMRLATAWSLRSLVAIAGLMEVKETGDPGGQLVLAGDPRQLGPVLRSPLTQKHGLGYSLLERLLTYNSLYKKGPDGYDPQFITKLLRNYRSHPTILDIPNQLYYEGELQACADVVDRERFCRWAXLPRQGFPIIFHGVMGKDEREGNSPSFFNPEEAATVTSYLKLLLAPSSKKGKARLSPRSVGVISPYRKQVEKIRYCITKLDRELRGLDDIKDLKVGSVEEFQGQERSVILISTVRXARALCSWIWTLIWVSLRTPRGSM

SEQ ID NO: 508 - protein, 250 aa, Homo sapiens
  SITE (16): Xaa equals any of the naturally occurring L-amino acids
EQYLPLTEEELEKEAXKVEGFDLVQKPSYYVRLGSLSTKLHSRAYQQALSRVKEAKQKSQQTISQLHSTVHLIEFARKNVYSANQKIQDAQDKLYLSWVEWKRSIGYDDTDESHCAEHIESRTLAIARNLTQQLQTTCHTLLSNIQGVPQNIQDQAKHMGVMAGDIYSVFRNAASFKEVSDSLLTSSKGQLQKMKESLDDVMDYLVNNTPLNWLVGPFYPQLTESQNAQDQGAEMDKSSQETQRSEHKTH

SEQ ID NO: 509 - protein, 98 aa, Homo sapiens
  SITE (97): Xaa equals any of the naturally occurring L-amino acids
HELWGCGPVTPRRTAPSGWAQAPLSDTAQVYMELQGLVDPQIQLPLLAARSTSCRSSLIASQPGPHQKGRQGLRGNKSFLPSSWNCQNWTRQPLTSXS

SEQ ID NO: 510 - protein, 392 aa, Homo sapiens
GAMRGDRGRGRGGRFGSRGGPGGGFRPFVPHIPFDFYLCEMAFPRVKPAPDETSFSEALLKRNQDLAPNSAEQASILSLVTKINNVIDNLIVAPGTFEVQIEEVRQVGSYKKGTMTTGHNVADLVVILKILPTLEAVAALGNKVVESLRAQDPSEVLTMLTNETGFEISSSDATVKILITTVPPNLRKLDPELHLDIKVLQSALAAIRHARWFEENASQSTVKVLIRLLKDLRIRFPGFEPLTPWILDLLGHYAVMNNPTRQPLALNVAYRRCLQILAAGLFLPGSVGITDPCESGNFRVHTVMTLEQQDMVCYTAQTLVRILSHGGFRKILGQEGDASYLASEISTWDGVIVTPSEKAYEKPPEKKEGEEEEENTEEPPQGEEEESMETQE

SEQ ID NO: 511 - protein, 72 aa, Homo sapiens
HGGGKGRQVGLHSVQRPARRETAASWGLCVKIPDLGVAFVYKMQEGKPVPDSSRQHAQLSGSPVSQGLSLPL

SEQ ID NO: 512 - protein, 181 aa, Homo sapiens
  SITE (14): Xaa equals any of the naturally occurring L-amino acids
  SITE (33): Xaa equals any of the naturally occurring L-amino acids
  SITE (135): Xaa equals any of the naturally occurring L-amino acids
GWCSCAHSSAWPGXWGASGIPQQAPMTVCDQAXPVTFLLLHLEGGDIHTVSHLSSPPPGVAHRMGTGGSRNPNPAWLGGALLVRGRPASLAPWGHSWKRGLAHAPLRAGTCTGHTRHSACWNRWLCSCSGPRAAXLRPCTSHMHWTRAETPVCYRALVLCGPGATAQSSQWRSTPLDSIFF

SEQ ID NO: 513 - protein, 202 aa, Homo sapiens
  SITE (15): Xaa equals any of the naturally occurring L-amino acids
LGDTIEGTPAGTVPXFPGRPTRAIMAQDQGEKENPMRELRIRKLCLNICVGESGDRLTRAAKVLEQLTGQTPVFSKARYTVRSFGIRRNEKIAVHCTVRGAKAEEILEKGLKVREYELRKNNFSDTGNFGFGIQEHIDLGIKYDPSIGIYGLDFYVVLGRPGFSIADKKRRTGCIGAKHRISKEEAMRWFQQKYDGIILPGK

SEQ ID NO: 514 - protein, 63 aa, Homo sapiens
  SITE (1): Xaa equals any of the naturally occurring L-amino acids
  SITE (2): Xaa equals any of the naturally occurring L-amino acids
  SITE (5): Xaa equals any of the naturally occurring L-amino acids
  SITE (16): Xaa equals any of the naturally occurring L-amino acids
  SITE (35): Xaa equals any of the naturally occurring L-amino acids
XXKNXITPKEESPPHXALLSKCLLTPSPKMPPILXVMAALGFERREFGSTSVERVQSRQLDCF

SEQ ID NO: 515 - protein, 218 aa, Homo sapiens
  SITE (151): Xaa equals any of the naturally occurring L-amino acids
  SITE (209): Xaa equals any of the naturally occurring L-amino acids
  SITE (211): Xaa equals any of the naturally occurring L-amino acids
SLARGCQRPDAVLYARHYNIPVIHAFRRAVDDPGLVFNQLPKMLYPEYHKVHQMMREQSILSPSPYEGYRSLPRHQLLCFKEDCQAVFQDLEGVEKVFGVSLVLVLIGSHPDLSFLPGAGADFAVDPDQPLSAKRNPIDVDPFTYQSTRQXGLYAMGPLAGDNFVRFVQGGALAVASSLLRKEQNHLHRQPWSSLRGIHPLIDLKSGVXPXLVKLTAQ

SEQ ID NO: 516 - protein, 41 aa, Homo sapiens
  SITE (22): Xaa equals any of the naturally occurring L-amino acids
NGRPDSTGPAIPGILSWGFETXLRDRETDPRNVLNCNGPHT

SEQ ID NO: 517 - protein, 250 aa, Homo sapiens
  SITE (118): Xaa equals any of the naturally occurring L-amino acids
  SITE (161): Xaa equals any of the naturally occurring L-amino acids
  SITE (204): Xaa equals any of the naturally occurring L-amino acids
GFNRSFCGRNATVYGKGVYFARRASLSVQDRYSPPNADGHKAVFVARVLTGDYGQGRRGLRAPPLRGPGHVLLRYDSAVDCICQPSIFVIFHDTQALPTHLITCEARAPRFPRRPLWXPGPLPRHLTEGATLWPPASQAPSSAQADAPRPQLWPPELSPGXPCLPLRAPEGGVGDGGQQRPRGAGLGPSLGRPHHQGSAEPRRXHRPPAAPRPRPSRLCCLNKREREPRRKGPGKKKKKKKKKKKKKKKK

SEQ ID NO: 518 - protein, 100 aa, Homo sapiens
  SITE (3): Xaa equals any of the naturally occurring L-amino acids
  SITE (7): Xaa equals any of the naturally occurring L-amino acids
NPXKKLXILIKWPPPFPPSFPPSPNSLSSSSFPPPLSLFSPSFTFLISVKLERFEIPIKVRLSPEPWTPETGLVTDAFKLKRKELRNHYLKDIERMYGGK

SEQ ID NO: 519 - protein, 60 aa, Homo sapiens
  SITE (5): Xaa equals any of the naturally occurring L-amino acids
  SITE (17): Xaa equals any of the naturally occurring L-amino acids
HEDGXLMGCRHRWHPRXVPFHQTSPKTELESTIFGSPRLASGLFPEWQSWGRMENLASYR

SEQ ID NO: 520 - protein, 120 aa, Homo sapiens
  SITE (25): Xaa equals any of the naturally occurring L-amino acids
SHPYAPSCGLRGPGAASRARTRERXPQAEAEARSTPGPAGSRLGPETFRQRFRQFRYQDAAGPREAFRQLRELSRQWLRPDIRTKEQIVEMLVQEQLLAILPEAARARRIRRRTDVRITG

SEQ ID NO: 521 - protein, 96 aa, Homo sapiens
GHQTVSPSTGSRVTRMFSLISFSHVFIKDICKLPKDEGTCRDFILKWYYDPNTKSCARFWYGGCGGNENKFGSQKECEKVCAPVLAKPGVISVMGT

SEQ ID NO: 522 - protein, 122 aa, Homo sapiens
  SITE (18): Xaa equals any of the naturally occurring L-amino acids
NSGFRPKNPVGRGGEPEXCGGAGGLGCTLVWGGTGAAVVTGVVWLLLPNGGVGVGLLGPQSPVGGSDSAPYSLHPAGRTWGLRSECIPPLSFNLSCRTHSGPGARLGEAGPNYGSRELQVPT

SEQ ID NO: 523 - protein, 94 aa, Homo sapiens [sequence omitted]

SEQ ID NO: 524 - protein, 93 aa, Homo sapiens
  SITE (78): Xaa equals any of the naturally occurring L-amino acids
  SITE (86): Xaa equals any of the naturally occurring L-amino acids
  SITE (93): Xaa equals any of the naturally occurring L-amino acids
SAVMGRKKKKQLKPWCWYCNRDFDDEKILIQHQKAKHFKCHICHKKLYTGPGLAIHCMQVHKETIDAVPNAYLGEQTXIGNIWYGXYSRKRYX

SEQ ID NO: 525 - protein, 324 aa, Homo sapiens
  SITE (323): Xaa equals any of the naturally occurring L-amino acids
DLRLSRPEAVEAEAMMAAMATARVRMGPRCAQALWRMPWLPVFLSLAAAAAAAAAEQQVPLVLWSSDRDLWAPAADTHEGHITSDLQLSTYLDPALELGPRNVLLFLQDKLSIEDFTAYGGVFGNKQDSAFSNLENALDLAPSSLVLPAVDWYAVSTLTTYLQEKLGASPLHVDLATLRELKLNASLPALLLIRLPYTASSGLMAPREVLTGNDEVIGQVLSTLKSEDVPYTAALTAVRPSRVARDVAVVAGGLGRQLLQKQPVSPVIHPPVSYNDTAPRILFWAQNFSVAYKDQWEDLTPLTFGVQELNLTGSFWNDSFASXH

SEQ ID NO: 526 - protein, 66 aa, Homo sapiens
  SITE (2): Xaa equals any of the naturally occurring L-amino acids
FXVSWTWKQVSEFPGDQRDEVLQLPPSSCNLVSSGAGGEPEKLASYITSLWLFFICKTRIILNCKG

SEQ ID NO: 527 - protein, 62 aa, Homo sapiens
  SITE (40): Xaa equals any of the naturally occurring L-amino acids
NTQLWFLCFPNCKAADNKTPGFHVSSAMSTLTQILKQNSXNAVLRIQLLLKPISICIITTNI

SEQ ID NO: 528 - protein, 122 aa, Homo sapiens
  SITE (80): Xaa equals any of the naturally occurring L-amino acids
  SITE (104): Xaa equals any of the naturally occurring L-amino acids
  SITE (105): Xaa equals any of the naturally occurring L-amino acids
YNKIEIMHLVMWPTSLLTTMDCFQQQLIFWSVLRGACMSFVTSGSTPAVKYCFHLPLQKASCLLTSTAKALFWTGYLIKXISVRLCSVIPSEPRFVSKATVLSXXPCVWGQVAIPPMSLVIL

SEQ ID NO: 529 - protein, 182 aa, Homo sapiens
  SITE (25): Xaa equals any of the naturally occurring L-amino acids
DRTRLSQASTPTPVCWGLLQPPPWXEAWYRLTHRGLCQVRFCRWSQALPEARGGAWAGSPGEGQAGPRLHTHIQPAGLSAVLSPSLSSPSSAVTLSSPSLPASPPAAPPVKRMTKDLSYAGSKNQNFLLAFSFVASPAPALPVSHPGPRLEASLHLSYCFKPKFTVSVGGQDLLSPPLLHPP

SEQ ID NO: 530 - protein, 183 aa, Homo sapiens
  SITE (6): Xaa equals any of the naturally occurring L-amino acids
  SITE (79): Xaa equals any of the naturally occurring L-amino acids
  SITE (80): Xaa equals any of the naturally occurring L-amino acids
  SITE (81): Xaa equals any of the naturally occurring L-amino acids
ALVLGXKSVRMASSRMTRRDPLTNKVALVTASTDGIGFASPGVWPRTGPRGRQQPEAAECGPGGGTLQGEGLSVTGTCXXXGKAEDRERLVATAVKLHGGIDILVSNAAVNPFFGSIMDVTEEVWDKLWMDKEKEESMKETLRIRRLGEPEDCAGIVSFLCSEDASYITGETVVVGGGTPSRL

SEQ ID NO: 531 - protein, 129 aa, Homo sapiens
  SITE (89): Xaa equals any of the naturally occurring L-amino acids
  SITE (103): Xaa equals any of the naturally occurring L-amino acids
NSAPLSPTGLGQGHTGHVRFLAAVQLPDGFNLLCPTPPPPPDTGPEKLPSLEHRDSPWHRGPAPARPKMLVISGGDGYEDFRLSSGGGXAVRLWVETTAQTTXSCGGCDPVCRGPGLARPPAFSLLASP

SEQ ID NO: 532 - protein, 91 aa, Homo sapiens
GAIASSGPTGGRVRKHQLLPGAVREWEQLWAPHFRQVLPKPSDAVRPGLPVVLFRLCFQNAFISSVPFGPHKSPWGVGGGLCRHPHFKAGS

SEQ ID NO: 533 - protein, 67 aa, Homo sapiens
  SITE (63): Xaa equals any of the naturally occurring L-amino acids
NLCQVQPTRLYSSLHSGLHHVRQVTQKSYKVSTSGPRAFSSRSYTSGPGSRISSSAFSRVGGXSGGA

SEQ ID NO: 534 - protein, 144 aa, Homo sapiens
  SITE (140): Xaa equals any of the naturally occurring L-amino acids
  SITE (141): Xaa equals any of the naturally occurring L-amino acids
FNRRYPKIQFSLSTGPSGTMLDGVLEGKLNAAFIDGPINHTAIDGIPVYREELMIVTPQGYAPVTRASQVNGSNIYAFRANCSYRRHFESWFHADGAAPGTIHEMESYHGMLACVIAGAGIALIPRSMLESMPGHHQVEXXAVS

SEQ ID NO: 535 - protein, 175 aa, Homo sapiens
RAPARISGGGSAMVGGGGVGGGLLENANPLIYQRSGERPVTAGEEDEQVPDSIDAREIFDLIRSINDPEHPLTLEELNVVEQVRVQVSDPESTVAVAFTPTIPHCSMATLIGLSIKVKLLRSLPQRFKMDVHITPGTHASEHAVNKQLADKERVAAALENTHLLEVVNQCLSARS

SEQ ID NO: 536 - protein, 148 aa, Homo sapiens
GWHRTHHRGRHQAREAEEEAWAAAEPIKKVRKSLALDIVDEDVKLMMSTLPKSLSLPTTAPSNSSSLTLSGIKEDNSLLNQGFLQAKPEKAAVAQKPRSHFTTPAPMSSAWKTVACGGTRDQLFMQEKARQLLGRLKPSHTSRTLILS

SEQ ID NO: 537 - protein, 70 aa, Homo sapiens
  SITE (41): Xaa equals any of the naturally occurring L-amino acids
  SITE (42): Xaa equals any of the naturally occurring L-amino acids
RPTRSAWWGRLLSRVSPQPRPASPSVSTRNQLPEARRGVEXXECEETAASAERAGPPRALVFGAQSRSPG

SEQ ID NO: 538 - protein, 206 aa, Homo sapiens
GEVSASGIARRGGPMAPLGGAPRLVLLFSGKRKSGKDFVTEALQSRLGADVCAVLRLSGPLKEQYAQEHGLNFQRLLDTSTYKEAFRKDMIRWGEEKRQADPGFFCRKIVEGISQPIWLVSDTRRVSDIQWFREAYGAVTQTVRVVALEQSRQQRGWVFTPGVDDAESECGLDNFGDFDWVIENHGVEQRLEEQLENLIEFIRSRL

SEQ ID NO: 539 - protein, 350 aa, Homo sapiens
STLIAFIVISTLFPLLDMTEIYFSLLDEIVDTLGEGAFGKVVECIDHKAGGRHVAVKIVKNVDRYCEAARSEIQVLEHLNTTDPNSTFRCVQMLEWFEHHGHICIVFELLGLSTYDFIKENGFLPFRLDHIRKMAYQICKSVNFLHSNKLTHTDLKPENILFVQSDYTEAYNPKIKRDERTLINPDIKVVDFGSATYDDEHHSTLVSTRHYRAPEVILALGWSQPCDVWSIGCILIEYYLGFTVFPTHDSKEHLAMMERILGPLPKHMIQKTRKRKYFHHDRLDWDEHSSAGRYVSRRCKPLKEFMLSQDVEHERLFDLIQKMLEYDPAKRITLREALKHPFFDLLKKSI

SEQ ID NO: 540 - protein, 324 aa, Homo sapiens
  SITE (54): Xaa equals any of the naturally occurring L-amino acids
  SITE (56): Xaa equals any of the naturally occurring L-amino acids
  SITE (297): Xaa equals any of the naturally occurring L-amino acids
  SITE (304): Xaa equals any of the naturally occurring L-amino acids
  SITE (305): Xaa equals any of the naturally occurring L-amino acids
  SITE (317): Xaa equals any of the naturally occurring L-amino acids
  SITE (321): Xaa equals any of the naturally occurring L-amino acids
QATMGNVLAASSPPAGPPPPPAPALVGLPPPPPSPPGFTLPPLGGSLGAGTSTXRXSERTPGAATASASGAAEDGACGCLPNPGTFEECHRKCKELFPIQMEGVKLTVNKGLSNHFQVNHTVALSTIGESNYHFGVTYVGTKQLSPTEAFPVLVGDMDNSGSLNAQVIHQLGPGLRSKMAIQTQQSKFVNWQVDGEYRGSDFTAAVTLGNPDVLVGSGILVAHYLQSITPCLALGGELVYHRRPGEEGTVMSLAGKYTLNNWLATVTLGQAGMHATYYHKASDQLQVGVEFEASTRXQDTSVSXXVPAWNLPKGQPXLSKXLLG

SEQ ID NO: 541 - protein, 204 aa, Homo sapiens
RGPTFTPEIMAAEDVVATGADPSDLESGGLLHEIFTSPLNLLLLGLCIFLLYKIVRGDQPAASGDSDDDEPPPLPRLKRRDFTPAELRRFDGVQDPRILMAINGKVFDVTKGRKFYGPEGPYGVFAGRDASRGLATFCLDKEALKDEYDDLSDLTAAQQETLSDWESQFTFKYHHVGKLLKEGEEPTVYSDEEEPKDESARKND

SEQ ID NO: 542 - protein, 193 aa, Homo sapiens
  SITE (183): Xaa equals any of the naturally occurring L-amino acids
PAYSLGLLKSVLDGGGAGAHQARSNPSCMYPQGTFVIPLLVTAHRDPTQFKDPDCFNPTNFLDKGKFQGNDAFMPFASGAGRGGRGPAWTGSGVPGAHCAPVYPAKQMCLGTGLAHSGIFLFLTATLQRFCLLPVVRPGTINLTCSALAWAVSPQTSSSSQWPAEVRLHYGGLTGPQTSIPSXVNKGPKLQKK

SEQ ID NO: 543 - protein, 352 aa, Homo sapiens
  SITE (5): Xaa equals any of the naturally occurring L-amino acids
  SITE (154): Xaa equals any of the naturally occurring L-amino acids
  SITE (167): Xaa equals any of the naturally occurring L-amino acids
STVRXPGRPTRPMAAEEPQQQKQEPLGSDSEVLTVWPMMKPSWLSRTEFSKRLLCRTLWCQSGWSSRSYTRSMLKMTTSINRRSRTSTKSTRTSARPGLTATVSIGLSDSPTWRHCWMTARSCSGEKGGHWAPRQVGVYLLPGRVGCVSSRVSXSFPGDGLDSGLAXRGSAVSALASGLVEEPMLGPPFHPTPRFKAVSAKSKEDLVSQGFTEFTIEDFHNTFMDLIEQVEKQTSVADLLASFNDQSTSDYLVVYLRLLTSGYLQRESKFFEHFIEGGRTVKEFCQQEVEPMCKESDHIHIIALAQALSVSIQVEYMDRGEGGTTNPHIFPEGSEPKVYLLYRPGHYDILYK

SEQ ID NO: 544 - protein, 240 aa, Homo sapiens
STHASEMAERGYSFSLTTFSPSGKLVQIEYALAAVAGGAPSVGIKAANGVVLATEKKQKSILYDERSVHKVEPITKHIGLVYSGMGPDYRVLVHRARKLAQQYYLVYQEPIPTAQLVQRVASVMQEYTQSGGVRPFGVSLLICGWNEGRPYLFQSDPSGAYFAWKATAMGKNYVNGKTFLEKRYNEDLELEDAIHTAILTLKESFEGQMTEDNIEVGICNEAGFRRLTPTEVKDYLAAIA

SEQ ID NO: 545 - protein, 181 aa, Homo sapiens
RCILYTGFMLGAQREVDSRLLALPGRKVPTSWWDDLFKGAKEHGAVAVERVTKSPGETSKPRPFAGGGYRLGAAPEEESAYVAGEKRQHSSQDVHVVLKLWKSGFSLDNGELRSYQDPSNAQFLESIRRGEVPAELRRLAHGGQVNLDMEDHRDEDFVKPKGAFKAFTGEGQKLGSTAPRC

SEQ ID NO: 546 - protein, 197 aa, Homo sapiens
PRVRRRARAAAGSSHAAMADSELQLVEQRIRSFPDFPTPGVVFRDISPVLKDPASFRAAIGLLARHLKATHGGRIDYIAGLDSRGFLFGPSLAQELGLGCVLIRKRGKLPGPTLWASYSLEYGKAELEIQKDALEPGQRVVVVDDLLATGGTMNAACELLGRLQAEVLECVSLVELTSLKGREKLAPVPFFSLLQYE

SEQ ID NO: 547 - protein, 93 aa, Homo sapiens
  SITE (84): Xaa equals any of the naturally occurring L-amino acids
ETGKESKALFLPFPGSVYSTSTGEASGEGLSPLPHLHEFWNSVLLAACFQLPPISIAAGSSCLFYSVIKHPAPTLSQRSILILXKKIYEEKKK

SEQ ID NO: 548 - protein, 49 aa, Homo sapiens
  SITE (5): Xaa equals any of the naturally occurring L-amino acids
GLQLXAHAAGRVPGCALQGLGHFLQENKQLLRDVLAQELHKPAFEGRHI

SEQ ID NO: 549 - protein, 379 aa, Homo sapiens
VACCVRIPGPPRRSGPAMAVTITLKTLQQQTFKIRMEPDETVKVLKEKIEAEKGRDAFPVAGQKLIYAGKILSDDVPIRDYRIDEKNFVVVMVTKTKAGQGTSAPPEASPTAAPESSTSFPPAPTSGMSHPPPAAREDKSPSEESAPTTSPESVSGSVPSSGSSGREEDAASTLVTGSEYETMLTEIMSMGYERERVVAALRASYNNPHRAVEYLLTGIPGSPEPEHGSVQESQVSEQPATEAGENPLEFLRDQPQFQNMRQVIQQNPALLPALLQQLGQENPQLLQQISRHQEQFIQMLNEPPGELADISDVEGEVGAIGEEAPQMNYIQVTPQEKEAIERLKALGFPESLVIQAYFACEKNENLAANFLLSQNFDDE

SEQ ID NO: 550 - protein, 275 aa, Homo sapiens
  SITE (6): Xaa equals any of the naturally occurring L-amino acids
  SITE (235): Xaa equals any of the naturally occurring L-amino acids
  SITE (260): Xaa equals any of the naturally occurring L-amino acids
  SITE (261): Xaa equals any of the naturally occurring L-amino acids
  SITE (267): Xaa equals any of the naturally occurring L-amino acids
  SITE (272): Xaa equals any of the naturally occurring L-amino acids
CSCKRXHQQQVLPPRQPSALVPSVTEYRLDGHTISDLSRSSRGELIPISPSTEVGGSGIGTPPSVLKRQRKRRVALSPVTENSTSLSFLDSCNSLTPKSTPVKTLPFSPSQFLNFWNKQDTLELESPSLTSTPVCSQKVVVTTPLHRDKTPLHQKHAAFVTPDQKYSMDNTPHTPTPFKNALEKYGPLKPLPQTPHLEEDLKEVLRSEAGIELIIEDDIRPEKQKRKPGLRRSPXKKVRKSLALDIVDEDVKLMMSTLPXXLSLATXAPCKXFQP

SEQ ID NO: 551 - protein, 161 aa, Homo sapiens
  SITE (158): Xaa equals any of the naturally occurring L-amino acids
NLAAASGGGPQSVSGTLLCEPVLTMFATSGAVAAGKPYSCSECGKSFCYSSVLLRHERAHGGDGRFRCLECGERCARAADLRAHRRTHAGQTLYICSECGQSFRHSGRLDLHLGAHRQRCRTCPCRTCGRRFPHLPALLLHRRRQHLPERPRRCPLCXLRF

SEQ ID NO: 552 - protein, 405 aa, Homo sapiens
PRVRRRARGRRVRPAGGPVRRGAAVRGALRGASLGHGAAARAGRPLCVRHSEPVCGSDANTYANLCQLRAASRRSERLHRPPVIVLQRGACGQGQEDPNSLRHKYNFIADVVEKIAPAVVHIELFRKLPFSKREVPVASGSGFIVSEDGLIVTNAHVVTNKHRVKVELKNGATYEAKIKDVDEKADIALIKIDHQGKLPVLLLGRSSELRPGEFVVAIGSPFSLQNTVTTGIVSTTQRGGKELGLRNSDMDYIQTDAIINYGNSGGPLVNLDGEVIGINTLKVTAGISFAIPSDKIKKFLTESHDRQAKGKAITKKKYIGIRMMSLTSSKAKELKDRHRDFPDVISGAYIIEVIPDTPAEAGGLKENDVIISINGQSVVSANDVSDVIKRESTLNMVVRRVMKIS

SEQ ID NO: 553 - protein, 107 aa, Homo sapiens
AQENEEMEQPMQNGEEDRPLGGGEGHQPAGNRRGQARRLAPNFRWAIPNRQINDGMGGDGDDMEIFMEEMREIRRKLRELQLRNCLRILMGELSNHHDHHDEFCLMP

SEQ ID NO: 554 - protein, 229 aa, Homo sapiens
  SITE (8): Xaa equals any of the naturally occurring L-amino acids
  SITE (15): Xaa equals any of the naturally occurring L-amino acids
  SITE (20): Xaa equals any of the naturally occurring L-amino acids
  SITE (27): Xaa equals any of the naturally occurring L-amino acids
  SITE (78): Xaa equals any of the naturally occurring L-amino acids
GLSAESTXTSTMPMXLGYWXIRGLAHXIRLLLEYTDSSYEEKKYTMGDAPDYDRSQWLNEKFKLGLDFPNLPYLIDGXHKITQSNAILRYIARKHNLCGESEKEQIREDILENQFMDSRMQLAKLCYDPDFEKLKPEYLQALPEMLKLYSQFLGKQPWFLGDKITFVDFIAYDVLERNQVFEPSCLDAFPNLKDFISRFEGLEKISAYMKSSRFLPRPVFTKMAVWGNK

SEQ ID NO: 555 - protein, 106 aa, Homo sapiens
  SITE (59): Xaa equals any of the naturally occurring L-amino acids
  SITE (60): Xaa equals any of the naturally occurring L-amino acids
  SITE (72): Xaa equals any of the naturally occurring L-amino acids
  SITE (98): Xaa equals any of the naturally occurring L-amino acids
NVISVDPNDQKKTACYDIDVEVDDTLKTQMNSFLLSTASQQEIATLDNKTMTDVVGNQXXSAELSSTSSPGXGGCVPILLLQGAAETTRIRASPGNPXYIGPLPQP

SEQ ID NO: 556 - protein, 86 aa, Homo sapiens
GRATKQNTTKPNHRIIFNPTFYTMPQFPITLHTSFCVQLNCNCFLYLERVTIELETFYSGRLGSFWWDSVGEREEGEVGGLLPFRT

SEQ ID NO: 557 - protein, 565 aa, Homo sapiens
  SITE (57): Xaa equals any of the naturally occurring L-amino acids
  SITE (71): Xaa equals any of the naturally occurring L-amino acids
  SITE (75): Xaa equals any of the naturally occurring L-amino acids
  SITE (82): Xaa equals any of the naturally occurring L-amino acids
  SITE (118): Xaa equals any of the naturally occurring L-amino acids
  SITE (120): Xaa equals any of the naturally occurring L-amino acids
  SITE (552): Xaa equals any of the naturally occurring L-amino acids
ASLTGTQALPPLFSLGYHQSRWNYRDEADVLEVDQGFDDHNLPCDVIWLDIEHADGXRYFTWDPSRFPQPXTMLXRLASKRXKLVAIVDPHIKVDSGYRVHEELRNLGLYVKTRDGSXYXGWCWPGSAGYPDFTNPTMRAWWANMFSYDNYEGSAPNLFVWNDMNEPSVFNGPEVTMLKDAQHYGGWEHRDVHNIYGLYVHMATADGLRQRSGGMERPFVLARAFFAGSQRFGAVWTGDNTAEWDHLKISIPMCLSLGLVGLSFCGADVGGFFKNPEPELLVRWYQMGAYQPFFRAHAHLDTGRREPWLLPSQHNDIIRDALGQRYSLLPFWYTLLYQAHREGIPVMRPLWVQYPQDVTTFNIDDQYLLGDALLVHPVSDSGAHGVQVYLPGQGEVWYDIQSYQKHHGPQTLYLPVTLSSIPVFQRGGTIVPRWMRVRRSSECMKDDPITLFVALSPQGTAQGELFLDDGHTFNYQTRQEFLLRRFSFSGNTLVSSSADPEGHFETPIWIERVVIIGAGKPAAVVLQTKGSPESRLSFQHDPETSVLVLRKXGINVASDWSIHLR

SEQ ID NO: 558 - protein, 160 aa, Homo sapiens
  SITE (39): Xaa equals any of the naturally occurring L-amino acids
REAVLPQAVLRHPVRTQRREHRGRGLLHLREAPGGGAAXHRPHRGPRGPSRGAEGERPPEGPSRASSVTTFTGEPNTCPRCSKKVYFAEKVTSLGKDWHRPCLRCERCGKTLTPGGHAEHDGQPYCHKPCYGILFGPKGVNTGAVGSYIYDRDPEGKVQP

SEQ ID NO: 559 - protein, 480 aa, Homo sapiens
GCIGYLVLLWPLPLIHFGLANQSEDLSVFYPGTLLETGHDILFFWVARMVMLGLKLTGRLPFREVYLHAIVRDAHGRKMSKSLGNVIDPLDVIYGISLQGLHNQLLNSNLDPSEVEKAKEGQKADFPAGIPECGTDALRFGLCAYMSQGRDINLDVNRILGYRHFCNKLWNATKFALRGLGKGFVPSPTSQPGGHESLVDRWIRSRLTEAVRLSNQGFQAYDFPAVTTAQYSFWLYELCDVYLECLKPVLNGVDQVAAECARQTLYTCLDVGLRLLSPFMPFVTEELFQRLPRRMPQAPPSLCVTPYPEPSECSWKDPEAEAALELALSITRAVRSLRADYNLTRIRPDCFLEVADEATGALASAVSGYVQALASAGVVAVLALGAPAPQGCAVALASDRCSIHLQLQGLVDPARELGKLQAKRVEAQRQAQRLRERRAASGYPVKVPLEVQEADEAKLQQTEAELRKVDEAIALFQKML

SEQ ID NO: 560 - protein, 96 aa, Homo sapiens [sequence omitted]

SEQ ID NO: 561 - protein, 60 aa, Homo sapiens
IRHESSILSVLFIRFLKCADPFKTPAYLCNKEKYSKILPSFSHTVLKMLQDQIIAHKIRS

SEQ ID NO: 562 - protein, 241 aa, Homo sapiens
SSMAKPCGVRLSGEARKQVEVFRQNLFQEAEEFLYRFLPQKIIYLNQLLQEDSLNVADLTSLRAPLDIPIPDPPPKDDEMETDKQEKKEVPKCGFLPGNEKVLSLLALVKPEVWTLKEKCILVITWIQHLIPKIEDGNDFGVAIQEKVLERVNAVKTKVEAFQTTISKYFSERGDAVAKASKETHVMDYRALVHERDEAAYGELRAMVLDLRAFYAELYHIISSNLEKIVNPKGEEKPSMY

SEQ ID NO: 563 - protein, 200 aa, Homo sapiens
  SITE (145): Xaa equals any of the naturally occurring L-amino acids
LGSIQVMQAVRNAGSRFLRSWTWPQTAGRVVARTPAGTICTGARQLQDAAAKQKVEQNAAPSHTKFSIYPPIPGEESSLRWAGKKFEEIPIAHIKASHNNTQIQVVSASNEPLAFASCGTEGFRNAKKGTGIAAQTAGIAAAARXKQKGVIHIRVVVKGLGPGRLSAMHGLIMGGLEVISITDNTPIPHNGCRPRKARKL

SEQ ID NO: 564 - protein, 115 aa, Homo sapiens
VRLVPGADKYNDDIRKGIVLLEELLPKGSKEEQRDYVFYLAVGNYRLKEYEKALKYVRGLLQTEPQNNQAKELERLIDKAMKKDGLVGMAIVGGMALGVAGLAGLIGLAVSKSKS

SEQ ID NO: 565 - protein, 101 aa, Homo sapiens
PTRPDEHDENNAEASAELSNEGVMNHRSEEERVTETQKNERVKKQLQALSSELAQARDETKKTQNDVLHAENVKAGRDKYKTLRQIRQGNTKQRIDEFEAM

SEQ ID NO: 566 - protein, 25 aa, Homo sapiens
TADLVIRPPRPLKVLGFCVFCAPPL

SEQ ID NO: 567 - protein, 274 aa, Homo sapiens
  SITE (182): Xaa equals any of the naturally occurring L-amino acids
  SITE (216): Xaa equals any of the naturally occurring L-amino acids
  SITE (222): Xaa equals any of the naturally occurring L-amino acids
  SITE (224): Xaa equals any of the naturally occurring L-amino acids
  SITE (228): Xaa equals any of the naturally occurring L-amino acids
  SITE (231): Xaa equals any of the naturally occurring L-amino acids
ASPEVEAGAARQPLLGVAGGQTLGATPGPVMNGPADGEVDYKKKYRNLKRKLKFLIYEHECFQEELRKAQRKLLKVSRDKSFLLDRLLQYENVDEDSSDSDATASSDNSETEGTPKLSDTPAPKRKRSPPLGGAPSPSSLSLPPSTGFPLQASGVPSPYLSSLASSRYPPFPSDYLALQLPXPSPLRPKREKRPRLPRKLKMAVGPPDCPVGGPLXFPGRGXGXGVGXTLXPLPPPKMPPPTILSTVPRQMFSDAGSGDDALDGDDDLVIDIPE

SEQ ID NO: 568 - protein, 133 aa, Homo sapiens
  SITE (47): Xaa equals any of the naturally occurring L-amino acids
ARGDHVRSRETGRQSASKGQIPLLPRGPAVPGGPSAQTAAQRELRGXVGAGAPVYLAAVLEYLTAEILELAGNAARDNKKTRIIPRHLQLAIRNDEELNKLLGKVTIAQGGVLPNIQAVLLPKKTESQKTKSK

SEQ ID NO: 569 - protein, 153 aa, Homo sapiens
  SITE (136): Xaa equals any of the naturally occurring L-amino acids
  SITE (137): Xaa equals any of the naturally occurring L-amino acids
  SITE (152): Xaa equals any of the naturally occurring L-amino acids
MCRGYAWNPGITLQNRKTKEGPRAPPSRMPEPAGGLRGCEAVGTLLMKETVFALHPSLPLGAGSSPSATCSEGLHLRGEGWGKSPPVPFLWPCCPHTQLRGPTLGKAGSARSLSPISALSAWIPAEAMKGNKEKRXXKKKKKKKKKKKKKKXP

SEQ ID NO: 570 - protein, 327 aa, Homo sapiens
PGSPRRCDIIIISGRKEKCEAAKEALEALVPVTIEVEVPFDLHRYVIGQKGSGIRKMMDEFEVNIHVPAPELQSDIIAITGLAANLDRAKAGLLERVKELQAEQEDRALRSFKLSVTVDPKYHPKIIGRKGAVITQIRLEHDVNIQFPDKDDGNQPQDQITITGYEKNTEAARDAILRIVGELEQMVSEDVPLDHRVHARIIGARGKAIRKIMDEFKVDIRFPQSGAPDPNCVTVTGLPENVEEAIDHILNLEEEYLADVVDSEALQVYMKPPAHEEAKAPSRGFVVRDAPWTASSSEKAPDMSSSEEFPSFGAQVAPKTLPWGPKR

SEQ ID NO: 571 - protein, 166 aa, Homo sapiens
  SITE (9): Xaa equals any of the naturally occurring L-amino acids
  SITE (12): Xaa equals any of the naturally occurring L-amino acids
GNSRVDPRXRGXAHTCAPCPAPGPLAGRAVSGHGSLPPDRRAPSALSSPADEGERRRPDLDEIHRELRPQGSARPQPDPNAEFDPDLPGGGLHRCLACARYFIDSTNLKTHFRSKDHKKRLKQLSVEPYSQEEAERAAGMGSYVPPRRLAVPTEVSTEVPEMDTST

SEQ ID NO: 572 - protein, 113 aa, Homo sapiens
QSSTFHPAPAFGATVAAFHRRAALRAPEPAMSGPNGDLGMPVEAGAEGEEDGFGEAEYAAINSMLDQINSCLDHLEEKNDHLHARLQELLESNRQTRLEFQQQLGEAPSDASP

SEQ ID NO: 573 - protein, 99 aa, Homo sapiens
  SITE (27): Xaa equals any of the naturally occurring L-amino acids
  SITE (37): Xaa equals any of the naturally occurring L-amino acids
  SITE (38): Xaa equals any of the naturally occurring L-amino acids
GSGSSRDLHKALWEAGWETVEGGCPLXPRRHRIWALXXAFLPEYAAINSMLDQINSCLDHLEEKNDHLHARLQELLESNRQTRLEFQQQLGEAPSDASP

SEQ ID NO: 574 - protein, 197 aa, Homo sapiens
  SITE (97): Xaa equals any of the naturally occurring L-amino acids
  SITE (124): Xaa equals any of the naturally occurring L-amino acids
  SITE (129): Xaa equals any of the naturally occurring L-amino acids
RWARVEAAVMEGAGAGSGFRKELVSRLLHLHFKDDKTKVSGDALQLMVELLKVFVVEAAVRGVRQAQAEDALRVDVDQLEKVLRSCSGLLGISAVAXATPRGAPGPQKQALCFQRPLIRGREGXEGFGXDSNKISGSLQPVQKGQDCSALRALECPVGTLVWEGAAPGESLPLLPGTIVCMPPGVLQAGAGKGLASR

SEQ ID NO: 575 - protein, 47 aa, Homo sapiens [sequence omitted]

SEQ ID NO: 576 - protein, 115 aa, Homo sapiens
WSRTSQPLPSTVGCPRRRGFKDFQRRILVATNLFGRGMDIERVNIAFNYDMPEDSDTYLHRVARAGRFGTKGLAITFVSDENDAKILNDVQDRFEVNISELPDEIDISSYIEQTR

SEQ ID NO: 577 - protein, 346 aa, Homo sapiens
  SITE (37): Xaa equals any of the naturally occurring L-amino acids
VTSCVALLPARRMTYTTETALLNWSTCQMVLRGAETXGCVIVSAAKAQLLQCQHHPAWYGDTLKQKTSWTCLLDGMQYFATTESSPTEQDGRQLWLEVKNIEEHRQRSLDSVQELMESGQAVGGMVTTTTDWNQPAEAQQAQQVQRIISRCNCRMYYISYSHDIDPELATQIKPPEVLENQEKEDLLKKQEGAVDTFTLIHHELEISTNPAQYAMILDIVNNLLLHVEPKRKEHSEKKQRVRFQLEISSNPEEQRSSILHLQEAVRQHVAQIRQLEKQMYSIMKSLQDDSKNENLLDLNQKLQLQLNQEKANLQLESEELNILIRCFKDFQLQRANKMELRKHKKM

SEQ ID NO: 578 - protein, 91 aa, Homo sapiens
RHEGHLGSGRNGGGSMNAPPAFESFLLFEGEKITINKDTKVPNACLFTINKEDHTLGNIIKSRACFPFAFCRDCQFPEASPATLPVQPAEL

SEQ ID NO: 579 - protein, 331 aa, Homo sapiens
  SITE (18): Xaa equals any of the naturally occurring L-amino acids
  SITE (20): Xaa equals any of the naturally occurring L-amino acids
  SITE (300): Xaa equals any of the naturally occurring L-amino acids
  SITE (311): Xaa equals any of the naturally occurring L-amino acids
  SITE (313): Xaa equals any of the naturally occurring L-amino acids
  SITE (320): Xaa equals any of the naturally occurring L-amino acids
  SITE (325): Xaa equals any of the naturally occurring L-amino acids
GRPTRPGGLGSGVLALAXGXPARLAGTVHEVGDAPRRAPDQAAEIGSRGSTKAQGPQQQPGSEGPSYAKKVALWLAGLLGAGGTVSVVYIFGNNPVDENGAKIPDEFDNDPILVQQLRRTYKYFKDYRQMIIEPTSPCLLPDPLQEPYYQPPYTLVLELTGVLLHPEWSLATGWRFKKRPGIETLFQQLAPLYEIVIFTSETGMTAFPLIDSVDPHGFISYRLFRDATRYMDGHHVKDISCLNRDPARVVVVDCKKEAFRLQPYNGVALRPWDGNSDDRVLLDLSAFLKTIALNGVGGRXEPCWEHYALGXDXPRWAAFXNSGKXGLEAGR

SEQ ID NO: 580 - protein, 374 aa, Homo sapiens
  SITE (235): Xaa equals any of the naturally occurring L-amino acids
  SITE (285): Xaa equals any of the naturally occurring L-amino acids
  SITE (307): Xaa equals any of the naturally occurring L-amino acids
  SITE (319): Xaa equals any of the naturally occurring L-amino acids
  SITE (324): Xaa equals any of the naturally occurring L-amino acids
  SITE (341): Xaa equals any of the naturally occurring L-amino acids
  SITE (359): Xaa equals any of the naturally occurring L-amino acids
PSTVRNSRVDPRVRPRVRAGVAALATVGVASGPGPGRPGPLQDETLGVASVPSQWRAVQGIRGETKSCQTASIATASASAQARNHVDAQVQTEAPVPVSVQPPSQYDIPRLAAFLRRVEAMVIRELNKNWQSHAFDGFEVNWTEQQQMVSCLYTLGYPPAQAQGLHVTSISWNSTGSVVACAYGRLDHGDWSTLKSFVCAWNLDRRDLRPQQPSAVVEVPSAVLCLAFHPTQPSXVAGGLYSGEVLVWDLSRLEDPLLWRTGLTDDTHTDPVSQVVWLPEPGHSXRFQVLSVATDGKVLLWQGIGVXQLQFTEGFAWFXQQLPXSTKLKKHPRGRPRWAPXQAFFQFDLRFSFWQEAVXVQFSWHWRAALRGAH

SEQ ID NO: 581 - protein, 94 aa, Homo sapiens
  SITE (80): Xaa equals any of the naturally occurring L-amino acids
  SITE (90): Xaa equals any of the naturally occurring L-amino acids
CPDQNGWASFGAPLSAGGQPCYLLDIGCGSGLSGDYLSDEGHYWVGIDISPAMLDAALDRDTEGDLLLGDMGQGIPFKPXSLMDVSAFCXSVAL

SEQ ID NO: 582 - protein, 163 aa, Homo sapiens
PTRPAAGGAERIAGSAMSSEPPPPPQPPTHQASVGLLDTPRSRERSPSPLRGNVVPSPLPTRRTRTFSATVRASQGPVYKGVCKCFCRSKGHGFITPADGGPDIFLHISDVEGEYVPVEGDEVTYKMCSIPPKNEKLQAVEVVITHLAPGTKHETWSGHVISS

SEQ ID NO: 583 - protein, 293 aa, Homo sapiens
  SITE (52): Xaa equals any of the naturally occurring L-amino acids
  SITE (53): Xaa equals any of the naturally occurring L-amino acids
  SITE (58): Xaa equals any of the naturally occurring L-amino acids
  SITE (150): Xaa equals any of the naturally occurring L-amino acids
  SITE (171): Xaa equals any of the naturally occurring L-amino acids
  SITE (207): Xaa equals any of the naturally occurring L-amino acids
  SITE (254): Xaa equals any of the naturally occurring L-amino acids
LLGPNLTMGSQPGRIPDLLEKGERLPQPPICTIDVYMIMVKCWMIDSECRPXXRELVXEFSRMARDPQRFVVIQNEDLGPASPLDSTFYRSLLEDDDMGDLVDAEEYLVPQQGFFCPDPAPGAGGMVHHRHRSSSTRSGGGDLTLGLEPXERGGPQVSTGTLRRAGSDVFXGDLGMGAAKGLQSLPTHDPSPLQRYSEDPTVPLPSXTDGYVAPLTCSPQPEYVNQPDVRPQPPSPREGPLPAARPAGATLERXKTLSPGKNGVVKEFLPLGVPWRTPSIDTPGEGACPSAPP

SEQ ID NO: 584 - protein, 132 aa, Homo sapiens
GGAQPGMEGAAATVHLISQWAVEPNARVGPLLEVEAAAADHHEAAAGAGSAVEKICIDKGLTDESEILRFLQHGTLVGLLPVPHPILIRKYQANSGTAMWFRTYMWGVIYLRNVDPPVWYDTDVKLFEIQRV

SEQ ID NO: 585 - protein, 218 aa, Homo sapiens
  SITE (54): Xaa equals any of the naturally occurring L-amino acids
  SITE (92): Xaa equals any of the naturally occurring L-amino acids
  SITE (117): Xaa equals any of the naturally occurring L-amino acids
  SITE (140): Xaa equals any of the naturally occurring L-amino acids
  SITE (141): Xaa equals any of the naturally occurring L-amino acids
  SITE (188): Xaa equals any of the naturally occurring L-amino acids
  SITE (199): Xaa equals any of the naturally occurring L-amino acids
  SITE (200): Xaa equals any of the naturally occurring L-amino acids
RERCRREALRGSRLCPATPPSALGSQDGSRTRDRLGAAGWPGLVVGLCTPAAGXQRDLLHRRGGTASFGKSFAQKSGYFLCLSSLGSLENPXENVVADIQIVVDKSPLPLGFSPVCXPMDSKASVSKKKRMCVKLLPLGXXDTAVFDVRLSGKTKTVPGYLRIGDMGGFAIWCKKGQGPEASCPKPRXPQPGTCKGFSXXAASQPKLRAGLLGSRTSV

SEQ ID NO: 586 - protein, 233 aa, Homo sapiens
  SITE (41): Xaa equals any of the naturally occurring L-amino acids
ARGEMEGRQVLEVKMQVEYMSFSAHADAKGIMQLVGQAEPXSVLLVHGEAKKMEFLKQKIEQELRVNCYMPANGETVTLPTSPSIPVGISLGLLKREMAQGLLPEAKKPRLLHGTLIMKDSNFRLVSSEQALKELGLAEHQLRFTCRVHLHDTRKEQETALRVYSHLKSVLKDHCVQHLPDGSVTVESVLLQAAAPSEDPGTKVLLVSWTYQDEELGSFLTSLLKKGLPQAPS

SEQ ID NO: 587 - protein, 116 aa, Homo sapiens
  SITE (100): Xaa equals any of the naturally occurring L-amino acids
GPLSHHIRAQLSKMLLARKQILCVNVKNFAVIYLVDITEVPDFNKMYELYDPCTVMFFFRNKHIMIDLGTGNNNKINWAMEDKQEMVDIIETVYRGARKXRGLVVSPKDYSTKYRY

SEQ ID NO: 588 - protein, 133 aa, Homo sapiens
ARAAVGRTAGVRTWAPLAMAAKVDLSTSTDWKEAKSFLKGLSDKQREEHYFCKDFVRLKKIPTWKEMAKGVAVKVEEPRYKKDKQLNEKISLLRSDITKLEVDAIVNAANSSPPPRSLIKDLRCGKKKKKKKK

SEQ ID NO: 589 - protein, 163 aa, Homo sapiens
RHRGQPLRQTRASSSPQLAGRSSSVLPAAAQPCTPTMDVFKKGFSIAKEGVVGAVEKTKQGVTEAAEKTKEGVMYVGAKTKENVVQSVTSVAEKTKEQANAVSEAVVSSVNTVATKTVEEAENIAVTSGVVRKEDLRPSAPQQEGEASKEKEEVAEEAQSGGD

SEQ ID NO: 590 - protein, 59 aa, Homo sapiens
RALLCLGHHPLLAQGVPALSDMRLPTLLPSSPWPPLACPPVLLHQPHCPPSAPPTLWSF

SEQ ID NO: 591 - protein, 116 aa, Homo sapiens
  SITE (31): Xaa equals any of the naturally occurring L-amino acids
VHAEAGRLCHGDCPRLCRPRQRSAPVQVYTXRQAALHGRPQRDPCVGGPRPLRCSRDCGGGHQRLVMPGTWTQAWQRRQVVNGLMLGQARIHVNRLEQAVVNLAPCEYFHTCCPFA

SEQ ID NO: 592 - protein, 290 aa, Homo sapiens
  SITE (30): Xaa equals any of the naturally occurring L-amino acids
  SITE (239): Xaa equals any of the naturally occurring L-amino acids
RRSLNTHGSGVSVCLQSLTLLATLCPGDQXSLGLLTPCYSGSEPSGTFGPVNPSLNNTYEFMSTFFLEVSSVFPDFYLHLGGDEVDFTCWKSNPEIQDFMRKKGFGEDFKQLESFYIQTLLDIVSSYGKGYVVWQEVFDNKVKIQPDTIIQVWREDIPVNYMKELELVTKAGFRALLSAPWYLNRISYGPDWKDFYVVEPLAFEGTPEQKALVIGGEACMWGEYVDNTNLVPRLWPRAXAVAERLWSNKLTSDLTFAYERLSHFRCELLRRGVQAQPLNVGFCEQEFEQT

SEQ ID NO: 593 - protein, 665 aa, Homo sapiens
  SITE (8): Xaa equals any of the naturally occurring L-amino acids
DADGRMDXLVSECSARLLQQEEEIKSLTAEIDRLKNCGCLGASPNLEQLQEENLKLKYRLNILRKSLQAERNKPTKNMINIISRLQEVFGHAIKAAYPDLENPPLLVTPSQQAKFGDYQCNSAMGISQMLKTKEQKVNPREIAENITKHLPDNECIEKVEIAGPGFINVHLRKDFVSEQLTSLLVNGVQLPALGENKKVIVDFSSPNIAKEMHVGHLRSTIIGESISRLFEFAGYDVLRLNHVGDWGTQFGMLIAHLQDKFPDYLTVSPPIGDLQVFYKESKKRFDTEEEFKKRAYQCVVLLQGKNPDITKAWKLICDVSRQELNKIYDALDVSLIERGESFYQDRMNDIVKEFEDRGFVQVDDGRKIVFVPGCSIPLTIVKSDGGYTYDTSDLAAIKQRLFEEKADMIIYVVDNGQSVHFQTIFAAAQMIGWYDPKVTRVFHAGFGVVLGEDKKKFKTRSGETVRLMDLLGEGLKRSMDKLKEKERDKVLTAEELNAAQTSVAYGCIKYADLSHNRLNDYIFSFDKMLDDRGNTAAYLLYAFTRIRSIARLANIDEEMLQKAARETKILLDHEKEWKLGRCILRFPEILQKILDDLFLHTLCDYIYELATAFTEFYDSCYCVEKDRQTGKILKVNMWRMLLCEAVAAVMAKGFDILGIKPVQRM

SEQ ID NO: 594 - protein, 116 aa, Homo sapiens
TVTETTVTVTTEPENRSLTIKLRKRKPEKKVEWTSDTVDNEHMGRRSSKCCCIYEKPRAFGESSTESDEEEEEGCGHTHCVRGHRKGRRRATLGPTPTTPPQPPDPSQPPPGPMQH

SEQ ID NO: 595 - protein, 294 aa, Homo sapiens
  SITE (269): Xaa equals any of the naturally occurring L-amino acids
  SITE (278): Xaa equals any of the naturally occurring L-amino acids
TQLRVSEREGPGDPQRFSDHTLRTPRLEDRPGDAMWGEGLRAWCRFVENRWCLKRVSAPLHLGLLGCPDAEAHFPAMLTLPLSPPSRKMATNFLAHEKIWFDKFKYDDAERRFYEQMNGPVAGASRQENGASVILRDIARARENIQKSLAGSSGPGASSGTSGDHGELVVRIASLEVENQSLRGVVQELQQAISKLEARLNVLEKSSPGHRATAPQTQHVSPMRQVEPPAKKPATPAEDDEDDDIDLFGSDNEEEDKEAAQLREERLRXYAEKKAKKXALVAKSSILLDFKPWG

SEQ ID NO: 596 - protein, 134 aa, Homo sapiens
VSRLGLLTPLGCSFGTDEWLCPVTALSLPGGYVHSRPLPRLRPMRYGDTLAPRSWRHRPLPWHSSFAGDPPLPKALSPCSHSRRTAARASGSLATGFERLHSWGLEGGVPKALSKSQSSSHQSLYKVLGPEALP

SEQ ID NO: 597 - protein, 91 aa, Homo sapiens
EGPEGANLFIYHLPQEFGDQDILQMFMPFGNVISAKVFIDKQTNLSKCFGFVSYDNPVSAQAAIQAMNGFQIGMKRLKVQLKRSKNDSKPY

SEQ ID NO: 598 - protein, 68 aa, Homo sapiens
RPTRPEKVGSGGSSVGSGDASSSRHHHRRRRFHLPQQPLLQREVWCVGTTGNANQAQSSTEQTLLKPK

SEQ ID NO: 599 - protein, 119 aa, Homo sapiens
  SITE (58): Xaa equals any of the naturally occurring L-amino acids
  SITE (68): Xaa equals any of the naturally occurring L-amino acids
  SITE (88): Xaa equals any of the naturally occurring L-amino acids
  SITE (98): Xaa equals any of the naturally occurring L-amino acids
  SITE (99): Xaa equals any of the naturally occurring L-amino acids
FGRDQVYLSYNNVSSLKMLVAKDNWVLSSEISQVRLYTLEDDKFLSFHMEMVVHVDAXQAFLLLSDLXQRPEWDKHYRSVELVQQVDXGRRHLPRHQXXPRRSHKAPGLRDPGLEAEAL

SEQ ID NO: 600 - protein, 177 aa, Homo sapiens
  SITE (1): Xaa equals any of the naturally occurring L-amino acids
  SITE (8): Xaa equals any of the naturally occurring L-amino acids
  SITE (69): Xaa equals any of the naturally occurring L-amino acids
  SITE (135): Xaa equals any of the naturally occurring L-amino acids
XERLRAQXEKSRDSQPRLPLRFPSWRGPWCGIEIAGYGAEVFRQYWDIPDGTDCHRKAYSTTSIASVAXLTAAAYRVTLNPPGTFLEGVAKVGQYTFTAAAVGAVFGLTTCISAHVREKPDDPLNYFLGGCAGGXTLGARTHNYGIGAAACVYFGIAASLVKMGRLEGWEVFAKPKV

SEQ ID NO: 601 - protein, 218 aa, Homo sapiens
RGGGGGASSCCCCAPSPRGRPVPARTPRRCPRPSPGPAMGLTVSALFSRIFGKKQMRILMVGLDAAGKTTILYKLKLGEIVTTIPTIGFNVETVEYKNICFTVWDVGGQDKIRPLWRHYFQNTQGLIFVVDSNDRERVQESADELQKMLQEDELRDAVLLVFANKQDMPNAMPVSELTDKLGLQHLRSRTWYVQATCATQGTGLYDGLDWLSHELSKR

SEQ ID NO: 602 - protein, 829 aa, Homo sapiens
  SITE (32): Xaa equals any of the naturally occurring L-amino acids
  SITE (454): Xaa equals any of the naturally occurring L-amino acids
PGQAGAEGHVRCCPGEEQKAGGERRCPGPQRXGAALGPGPGEARLDYSEFFTEDVGQLPGLTIWQIENFVPVLVEEAFHGKFYEADCYIVLKTFLDDSGSLNWEIYYWIGGEATLDKKACSAIHAVNLRNYLGAECRTVREEMGDESEEFLQVFDNDISYIEGGTASGFYTVEDTHYVTRMYRVYGKKNIKLEPVPLKGTSLDPRFVFLLDRGLDIYVWRGAQATLSSTTKARLFAEKINKNERKGKAEITLLVQGQELPEFWEALGGEPSEIKKHVPEDFWPPQPKLYKVGLGLGYLELPQINYKLSVEHKQRPKVELMPRMRLLQSLLDTRCVNILDCWSDVFIWLGRKSPRLVRAAALKLGQELCGMLHRPRHATVSRSLEGTEAQVFKAKFKNWDDVLTVDYTRNAEAVLQSPGLSGKVKRDAEKKDQMKADLTALFLPRQPPMSLAEAXQLMEEWNEDLDGMEGFVLEGKKFARLPEEEFGHFYTQDCYVFLCRYWVPVEYEEEEKKEDKEEKAEGKEGEEATAEAEEKQPEEDFQCIVYFWQGREASNMGWLTFTFSLQKKFESLFPGKLEVVRMTQQQENPKFLSHFKRKFIIHRGKRKAVQGAQQPSLYQIRTNGSALCTRCIQINTDSSLLNSEFCFILKVPFESEDNQGIVYAWVGRASDPDEAKLAEDILNTMFDTSYSKQVINEGEEPENFFWVGIGAQKPYDDDAEYMKHTRLFRCSNEKGYFAVTEKCSDFCQDDLADDDIMLLDNGQEVYMWVGTQTSQVEIKLSLKACQVYIQHMRSKEHERPRRLRLVRKGNEQHAFTRCFHAWSAFCKALA

SEQ ID NO: 603 - protein, 221 aa, Homo sapiens
TEPPLSCCLPATYPADMGTAGAMQLCWVILGFLLFRGHNSQPTMTQTSSSQGGLGGLSLTTEPVSSNPGYIPSSEANRPSHLSSTGTPGAGVPSSGRDGGTSRDTFQTVPPNSTTMSLSMREDATILPSPTSETVLTVAAFGVISFIVILVVVVIILVGVVSLRFKCRKSKESEDPQKPGSSGLSESCSTANGEKDSITLISMKNINMNNGKQSLSAEKVL

SEQ ID NO: 604 - protein, 97 aa, Homo sapiens
SCGLSLIKMTTSQKHRDFVAEPMGEKPVGSLAGIGEVLGKKLEERGFDKAYVVLGQFLVLKKDEDLFREWLKDTCGANAKQSRDCFGCLREWCDAFL

SEQ ID NO: 605 - protein, 266 aa, Homo sapiens
  SITE (84): Xaa equals any of the naturally occurring L-amino acids
GPRRLGALHAAATGARCLVELLVAHGADLNAKSLMDETPLDVCGDEEVRAKLLELKHKHDALLRAQSRQRSLLRRRTSSAGSRXKVVRRVSLTQRTDLYRKQHAQEAIVWQQPPPTSPEPPEDNDDRQTGAELRPPPPEEDNPEVVRPHNGRVGGSPVRHLYSKRLDRSVSYQLSPLDSTTPHTLVHDKAHHTLADLKRQRAAAKLQRPPPEGPESPETAEPGLPGDTVTPQPDCGFRAGGDPPLLKLTAPAVEAPVERRPCCLLM

SEQ ID NO: 606 - protein, 331 aa, Homo sapiens
  SITE (91): Xaa equals any of the naturally occurring L-amino acids
  SITE (285): Xaa equals any of the naturally occurring L-amino acids
HDSCFVEMQAQKVMHVSSAELNYSLPYDSKHQIRNASNVKHHDSSALGVYSYIPLVENPYFSSWPPSGTSSKMSLDLPEKQDGTVFPSSLXPTSSTSLFSYYNSHDSLSLNSPTNISSLLNQESAVLATAPRIDDEIPPPLPVRTPESFIVVEEAGEFSPNVPKSLSSAVKVKIGTSLEWGGTSEPKKFDDSVILRPSKSVKLRSPKSELHQDRSSPPPPLPERTLESFFLADEDCMQAQSIETYSTSYPDTMENSTSSKQTLKTPGKSFTRSKSLKILRNMKKXICNSCPPNKPAESVQSNNSSSFLNFGFANRFSKPKGPRNPPPTWNI

SEQ ID NO: 607 - protein, 192 aa, Homo sapiens
  SITE (78): Xaa equals any of the naturally occurring L-amino acids
AAPSEPKARGGHGGALARLETMPKLQGFEFWSRTLRGARHVVAPMVDQSELAWRLLSRRHGAQLCYTPMLHAQVFVRXANYRKENLYCEVCPEDRPLIVQFCANDPEVFVQAALLAQDYCDAIDLNLGCPQMIAKRGHYGAFLQDEWDLLQRMILLAHEKLSVPVTCKIRVFPEIDKTVSTPRCWRRPAASC

SEQ ID NO: 608 - protein, 415 aa, Homo sapiens
HIKCPHSKYGCTFIGNQDTYETHLETCRFEGLKEFLQQTDDRFHEMHVALAQKDQEIAFLRSMLGKLSEKIDQLEKSLELKFDVLDENQSKLSEDLMEFRRDASMLNDELSHINARLNMGILGSYDPQQIFKCKGTFVGHQGPVWCLCVYSMGDLLFSGSSDKTIKVWDTCTTYKCQKTLEGHDGIVLALCIQGCKLYSGSADCTIIVWDIQNLQKVNTIRAHDNPVCTLVSSHNVLFSGSLKAIKVWDIVGTELKLKKELTGLNHWVRALVAAQSYLYSGSYQTIKIWDIRTLDCIHVLQTSGGSVYSIAVTNHHIVCGTYENLIHVWDIESKEQVRTLTGHVGTVYALAVISTPDQTKVFSASYDRSLRVWSMDNMICTQTLLRHQGSVTALAVSRGRLFSGAVDSTVKVWTC

SEQ ID NO: 609 - protein, 48 aa, Homo sapiens
  SITE (27): Xaa equals any of the naturally occurring L-amino acids
  SITE (34): Xaa equals any of the naturally occurring L-amino acids
FSELNQCFYICFFFYASWKWRMKIQLXCSNSRRXVSTEKGTCFFTPEL

SEQ ID NO: 610 - protein, 241 aa, Homo sapiens
  SITE (1): Xaa equals any of the naturally occurring L-amino acids
  SITE (3): Xaa equals any of the naturally occurring L-amino acids
  SITE (7): Xaa equals any of the naturally occurring L-amino acids
  SITE (13): Xaa equals any of the naturally occurring L-amino acids
  SITE (37): Xaa equals any of the naturally occurring L-amino acids
XDXGRPXRTAESXFGINLKGPKIKGGADVSGGVSAPXISLGEGHLSVKGSGGEWKGPQVSSALNLDTSKFAGGLHFSGPKVEGGVKGGQIGLQAPGLSVSGPQGHLESGSGKVTFPKMKIPKFTFSGRELVGREMGVDVHFPKAEASIQAGAGDGEWEESEVKLKKSKIKMPKFNFSKPKGKGGVTGSPEASISGSKGDLKSSKASLGSLEGEAEAEASSPKGKFSLFKSKKPRHRCKFIQ

SEQ ID NO: 611 - protein, 77 aa, Homo sapiens [sequence omitted]

SEQ ID NO: 612 - protein, 137 aa, Homo sapiens
LQVPVRNSGSPTRQAAAMTFCRLLNRCGEAARSLPLGARCFGVRVSPTGEKVTHTGQVYDDKDYRRIRFVGRQKEVNENFAIDLIAEQPVSEVETRVIACDGGGGALGHPKVYINLDKETKTGTCGYCGLQFRQHHH

SEQ ID NO: 613 - protein, 122 aa, Homo sapiens
  SITE (50): Xaa equals any of the naturally occurring L-amino acids
  SITE (75): Xaa equals any of the naturally occurring L-amino acids
  SITE (80): Xaa equals any of the naturally occurring L-amino acids
  SITE (85): Xaa equals any of the naturally occurring L-amino acids
  SITE (98): Xaa equals any of the naturally occurring L-amino acids
  SITE (105): Xaa equals any of the naturally occurring L-amino acids
  SITE (111): Xaa equals any of the naturally occurring L-amino acids
  SITE (116): Xaa equals any of the naturally occurring L-amino acids
YSTDNNNNWYSIFYLHSSFLGENAEKLLQFKRWFWSIVEKMSMTERQDLXYFWTSSPSLPASEEGFQPMPSITIXPPDDXHLPTXKYLHFLDFTFPLXSFKQDSXNRKLVXSPFRXQKFWVL

SEQ ID NO: 614 - protein, 62 aa, Homo sapiens
FFIGLETRANSIMFSKETDLSCWIRGTNPTYMIFFLFLSCSYGTVLFGTFATRDNTTFLTLI

SEQ ID NO: 615 - protein, 159 aa, Homo sapiens
VGLPNMAQSINITELNLPQLEMLKNQLDQEVEFLSTSIAQLKVVQTKYVEAKDCLNVLNKSNEGKELLVPLTSSMYVPGKLHDVEHVLIDVGTGYYVEKTAEDAKDFFKRKIDFLTKQMEKIQPALQEKHAMKQAVMEMMSQKIQQLTALGAAQATAKA

SEQ ID NO: 616 - protein, 93 aa, Homo sapiens
  SITE (8): Xaa equals any of the naturally occurring L-amino acids
KVACRYRXGIPGRPTRPGTQDAEGKKAKGKKVAPAPAVVKKQEAKKVVNPLFEKRPKNFGIGQDIQPKRDLTRFVKWPRYIRLQRHARSSTSG

SEQ ID NO: 617 - protein, 362 aa, Homo sapiens
  SITE (307): Xaa equals any of the naturally occurring L-amino acids
SRVDPRVRRGVPYQLGPHGHRQGLEAPLYLTPEGWSLFLQRYYQVVHEGAELRHLDTQVQRCEDILQQLQAVVPQIDMEGDRNIWIVKPGAKSRGRGIMCMDHLEEMLKLVNGNPVVMKDGKWVVQKYIERPLLIFGTKFDLRQWFLVTDWNPLTVWFYRDSYIRFSTQPFSLKNLDNSVHLCNNSIQKHLENSCHRHPLLPPDNMWSSQRFQAHLQEMGAPNAWSTIIVPGMKDAVIHALQTSQDTVQCRKASFELYGADFVFGEDFQPWLIEINASPTMAPSTAVTARLCAGVQADTLRVVIDRXLDRNCDTGAFELIYKQPAVEVPQYVGIRLLVEGFTIKKPMAMCHRRMGVRQQSLC

SEQ ID NO: 618 - protein, 328 aa, Homo sapiens
IRMREWWVQVGLLAVPLLAAYLHIPPPQLSPALHSWKSSGKFFTYKGLRIFYQDSVGVVGSPEIVVLLHGFPTSSYDWYKIWEGLTLRFHRVIALDFLGFGFSDKPRPHHYSIFEQASIVEALLRHLGLQNRRINLLSHDYGDIVAQELLYRYKQNRSGRLTIKSLCLSNGGIFPETHRPLLLQKLLKDGGVLSPILTRLMNFFVFSRGLTPVFGPYTRPSESELWDMWAGIRNNDGNLVIDSLLQYINQRKKFRRRWVGALASVTIPIHFIYGPLDPVNPYPEFLELYRKTLPRSTVSILDDHISHYPQLEDPMGFLNAYMGFINSF

SEQ ID NO: 619 - protein, 271 aa, Homo sapiens
NMDPPGLQGVQGTVAACGACYWLLGLMAVRASFENNCEIGCFAKLTNTYCLVAIGGSENFYSVFEGELSDTIPVVHASIAGCRIIGRMCVGNRHGLLVPNNTTDQELQHIRNSLPDTVQIRRVEERLSALGNVTTCNDYVALVHPDLDRETEEILADVLKVEVFRQTVADQVLVGSYCVFSNQGGLVHPKTSIEDQDELSSLLQVPLVAGTVNRGSEVIAAGMVVNDWCAFCGLDTTSTELSVVESVFKLNEAQPSTIATSMRDSLIDSLT

SEQ ID NO: 620 - protein, 88 aa, Homo sapiens
GSAAMKVKIKCWNGVATWLWVANDENCGICRMAFNGCCPDCKVPGDDCPLVWGQCSHCFHMHCILKWLHAQQVQQHCPMCRQEWKFKE

SEQ ID NO: 621 - protein, 46 aa, Homo sapiens
  SITE (35): Xaa equals any of the naturally occurring L-amino acids
  SITE (41): Xaa equals any of the naturally occurring L-amino acids
AGTSRSEGKRSSVLTRTEFQIEMFQTIEGEKWPGXSINLSXFHGCF

SEQ ID NO: 622 - protein, 103 aa, Homo sapiens
  SITE (35): Xaa equals any of the naturally occurring L-amino acids
  SITE (36): Xaa equals any of the naturally occurring L-amino acids
GRPTRPRGRGRSSACLLLEGDGPARLWAPTSPGVXXERFAEERGSGRALNAGPKHPGSLHSPRPQTLTKTWICSRFSCSRSSRSCPRLLRLRAEKKVCQAWTQ

SEQ ID NO: 623 - protein, 103 aa, Homo sapiens
  SITE (60): Xaa equals any of the naturally occurring L-amino acids
GRPTRPTSSRSRAARPFFFFFFFWFPEFGFILQYRNHLEPSETDIPEAEALSNQYCVALXPLRKPHLGYKRSFYVYPLYHGFLSPLLLPILPGENTAQRLPSE

SEQ ID NO: 624 - protein, 305 aa, Homo sapiens
  SITE (116): Xaa equals any of the naturally occurring L-amino acids
  SITE (117): Xaa equals any of the naturally occurring L-amino acids
  SITE (219): Xaa equals any of the naturally occurring L-amino acids
TQDLWMSCPVQTMDPEVTLLLQCPGGGLPQEQIQAELSPAHDRRPLPGGDEAITAIWETRLKAQPWLFDAPKFRLHSATLAPIGSRGPQLLLRLGLTSYRDFLGTNWSSSAAWLRXXGATDWGDTQAYLADPLGVGAALATADDFLVFLRRSRQVAEAPGLVDVPGGHPEPQALCPGGSPQHQDLAGQLVVHELFSSVLQEICDEVNLPLLTLSQPLLXGIARNETSAGRASAEFYVQCSLTSEQVRKHYLSGGPEAHESTGIFFVETQNVRRLPETEMWAELCPSPKAPSSSTTGFREVPLERP

SEQ ID NO: 625 - protein, 102 aa, Homo sapiens
SAMKASGTLREYKVVGRCLPTPKCRTPPLYRMRIFAPNHVVAKSRFWYFVSQLKKMKKSSGEIVYCGQVFEKSPLRVKNFGIWLRYDSRSGTHNMYRGVPGT

SEQ ID NO: 626 - protein, 59 aa, Homo sapiens
  SITE (36): Xaa equals any of the naturally occurring L-amino acids
ALWVKAWRQESEGQFQETQFINFHQHLPGPCLGTEXPSPESGHHFPFQSIECRGIQGMG

SEQ ID NO: 627 - protein, 220 aa, Homo sapiens
  SITE (93): Xaa equals any of the naturally occurring L-amino acids
RLVVTEEDGGARPEALGKIAPRTPAELGARADQELVTALMCDLRRPAAGGMMDLAYVCEWEKWSKSTHCPSVPLACAWSCRNLIAFTMDLRTXDQDLTRMIHILDTEHPWDLHSIPSEHHEAITCLEWDQSGSRLLSADADGQIKCWSMADHLANSWESSVGSLVEGDPIVALSWLHNGVKLALHVEKSGASSFGEKFSRVKFSPVLTLFGGKPWRAGSR

SEQ ID NO: 628 - protein, 119 aa, Homo sapiens
  SITE (115): Xaa equals any of the naturally occurring L-amino acids
  SITE (117): Xaa equals any of the naturally occurring L-amino acids
PASVEVYHDSLCRKIWREDDKWHVIFRADGWEQHITARYLVGADGANSMVRRHLYPDHQIRKYVAIQQWFAEKHPVPFYSCIFDNSITNCYSWSISKDGYFIFGGAYPMERRSDXFXDA

SEQ ID NO: 629 - protein, 39 aa, Homo sapiens
  SITE (30): Xaa equals any of the naturally occurring L-amino acids
  SITE (31): Xaa equals any of the naturally occurring L-amino acids
FGEPSLTVRADITGRYSIVSMLTTCRYSLXXHMKKVSSC

SEQ ID NO: 630 - protein, 267 aa, Homo sapiens
SAALPQPTPPLTLPQSMVNTKPEKTEEDSEEVREQKHKTFVEKYEKQIKHFGMLRRWDDSQKYLSDNVHLVCEETANYLVIWCIDLEVEEKCALMEQVAHQTIVMQFILELAKSLKVDPRACFRQFFTKIKTADRQYMEGFNDELEAFKERVRGRAKLRIEKAMKEYEEEERKKRLGPGGLDPVEVYESLPEELQKCFDVKDVQMLQDAISKMDPTDAKYHMQRCIDSGLWVPNSKASEAKEGEEAGPGDPLLEAVPKTGDEKDVSV

SEQ ID NO: 631 - protein, 207 aa, Homo sapiens
  SITE (164): Xaa equals any of the naturally occurring L-amino acids
PTGTGSGVPGLGRNGGREGAPGTMGLLTILKKMKQKERELRLLMLGLDNAGKTTILKKFNGEDIDTISPTLGFNIKTLEHRGFKLNIWDVGGQKSLRSYWRNYFESTDGLIWVVDSADRQRMQDCQRELQSLLVEERLAGATLLIFANKQDLPGALSSNAIREXLELDSIRSHHWCIQGCSAVTGENLLPGIDWLLDDISSRIFTAD

SEQ ID NO: 632 - protein, 79 aa, Homo sapiens
  SITE (54): Xaa equals any of the naturally occurring L-amino acids
  SITE (60): Xaa equals any of the naturally occurring L-amino acids
  SITE (61): Xaa equals any of the naturally occurring L-amino acids
  SITE (73): Xaa equals any of the naturally occurring L-amino acids
KNNKKDQQNGICSHTMIKTYLRTALFMGKRSLIDSQFHRLYRRHGLGRPQGNLXSMVEGXXGSMHHLHWPEQXEREQIW

SEQ ID NO: 633 - protein, 293 aa, Homo sapiens
  SITE (249): Xaa equals any of the naturally occurring L-amino acids
  SITE (282): Xaa equals any of the naturally occurring L-amino acids
WSPSPPATPEQGLSAFYLSYFDMLYPEDSSWAAKAPGASSREEPPEEPEQCPVIDSQAPAGSLDLVPGGLTLEEHSLEQVQSMVVGEVLKDIETACKLLNITADPMDWSPSNVQKWLLWTEHQYRLPPMGKAFQELAGKELCAMSEEQFRQRSPLGGDVLHAHLDIWKSAAWMKERTSPGAIHYCASTSEESWTDSEVDSSCSGQPIHLWQFLKELLLKPHSYGRFIRWLNKEKGIFKIEDSAQVARLXGIRKNRPAMNYDKLSRSIRQYYKKGIIRKPDIXQRLVYQFVHPI

SEQ ID NO: 634 - protein, 227 aa, Homo sapiens
PAGTGPEFPGRPTRPAEEEEEEDEEEEEEEEEEEEEEPQQRGQGEKSATPSRKILDPNTGEPAPVLSSPPPADVSTFLAFPSPEKLLRLGPKSSVLIAQQTDTSDPEKVVSAFLKVSSVFKDEATVRMAVQDAVDALMQKAFNSSSFNSNTFLTRLLVHMGLLKSEDKVKAIANLYGPLMALNHMVQQDYFPKALAPLLLAFVTKPNSALESCSFARHSLLQTLYKV

SEQ ID NO: 635 - protein, 126 aa, Homo sapiens
TSGCISNGKMSSNVPADMINLRLILVSGKTKEFLFSPNDSASDIAKHVYDNWPMDWEEEQVSSPNILRLIYQGRFLHGNVTLGALKLPFGKTTVMHLVARETLPEPNSQGQRNREKTGESNCCVIL

SEQ ID NO: 636 - protein, 195 aa, Homo sapiens
  SITE (96): Xaa equals any of the naturally occurring L-amino acids
VSGFAGPASLISMKLLSLVAVVGCLLVPPAEANKSSEDIRCKCICPPYRNISGHIYNQNVSQKDCNCLHVVEPMPVPGHDVEAYCLLCECRYEERXTTTIKVIIVIYLSVVGALLLYMAFLMLVDPLIRKPDAYTEQLHNEEENEDARSMAAAAASLGGPRANTVLERVEGAQQRWKLQVQEQRKTVFDRHKMLS

SEQ ID NO: 637 - protein, 159 aa, Homo sapiens
  SITE (92): Xaa equals any of the naturally occurring L-amino acids
  SITE (115): Xaa equals any of the naturally occurring L-amino acids
  SITE (138): Xaa equals any of the naturally occurring L-amino acids
  SITE (151): Xaa equals any of the naturally occurring L-amino acids
  SITE (156): Xaa equals any of the naturally occurring L-amino acids
RPTRPGNSRRRGRRGCWRLLGFGAAAIMPGIVELPTLEDLKVQEVKVSSSVLKAAAHHYGVQCDKPNKEFMLCRWEEKDPRRCLEEGKLVNXCALDFFRQIKLSLCRAFYRLLDXHRLLRPAVFSSLPQTAGQFDDVXGATGMVRLNWGKXSSHQXENS

SEQ ID NO: 638 - protein, 20 aa, Homo sapiens
FSRDKVSPCWPGWSRTPGLR

SEQ ID NO: 639 - protein, 408 aa, Homo sapiens
TWGQTPCSPGHGQRPSSTCLTVGPGGGPSLGRPCPQLLLQFGVLFCTILLLLWVSVFLYGSFYYSYMPTVSHLSPVHFYYRTDCDSSTTSLCSFPVANVSLTKGGRDRVLMYGQPYRVTLELELPESPVNQDLGMFLVTISCYTRGGRIISTSSRSVMLHYRSDLLQMLDTLVFSSLLLFGFAEQKQLLEVELYADYRENSYVPTTGAIIEIHSKRIQLYGAYLRIHAHFTGLRYLLYNFPMTCAFIGVASNFTFLSVIVLFSYMQWVWGGIWPRHRFSLQVNIRKRDNSRKEVQRRISAHQPGPEGQEESTPQSDVTEDGESPEDPSGTEGQLSEEEKPDQQPLSGEEELEPEASDGSGSWEDAALLTEANLPAPAPASASAPVLETLGSSEPAGGALRQRPTCSSS

SEQ ID NO: 640 - protein, 288 aa, Homo sapiens
  SITE (10): Xaa equals any of the naturally occurring L-amino acids
  SITE (15): Xaa equals any of the naturally occurring L-amino acids
  SITE (268): Xaa equals any of the naturally occurring L-amino acids
  SITE (271): Xaa equals any of the naturally occurring L-amino acids
  SITE (273): Xaa equals any of the naturally occurring L-amino acids
  SITE (274): Xaa equals any of the naturally occurring L-amino acids
  SITE (276): Xaa equals any of the naturally occurring L-amino acids
  SITE (286): Xaa equals any of the naturally occurring L-amino acids
FSSSACPSVXSLFVXLGKNPHDAQGHPRASEDQPSSGKPVTSYPGECGFVFTKEASLEIRDMLLANKVPAAARAGAIAPCEVTVPAQNTGLGPEKTSFFQALGITTKISRGTIEILSDVQLIKTGDKVGASEATLLNMLNISPFSFGLIIQQVFDNGSIYNPEVLDITEETLHSRFLEGVRNVASVCLQIGYPTVASVPHSIINGYKRVLALSVETDYTFPLAEKVKAFLADPSAFVAAAPVAAATTAAPAAAAAPAKVEAKEESEEXDEXIXXSXISKSNNSSQXIV

SEQ ID NO: 641 - protein, 444 aa, Homo sapiens
  SITE (34): Xaa equals any of the naturally occurring L-amino acids
NEQDNCVLIHDVDQRNSDKDIFGDACDNCLSVLXNDQKDTDGDGRGDACDDDMDGDGIKNILDNCPKFPNRDQRDKDGDGVGDACDSCPDVSNPNQSDVDNDLVGDSCDTNQDSDGDGHQDSTDNCPTVINSAQLDTDKDGIGDECDDDDDNDGIPDLVPPGPDNCRLVPNPAQEDSNSDGVGDICESDFDQDQVIDRIDVCPENAEVTLTDFRAYQTVVLDPEGDAQIDPNWVVLNQGMEIVQTMNSDPGLAVGYTAFNGVDFEGTFHVNTQTDDDYAGFIFGYQDSSSFYVVMWKQTEQTYWQATPFRAVAEPGIQLKAVKSKTGPGEHLRNSLWHTGDTSDQVRLLWKDSRNVGWKDKVSYRWFLQHRPQVGYIRVRFYEGSELVADSGVTIDTTMRGGRLGVFCFSQENIIWSNLKYRCNDTIPEDFQEFQTQNFDRFDN

SEQ ID NO: 642 - protein, 326 aa, Homo sapiens
  SITE (50): Xaa equals any of the naturally occurring L-amino acids
  SITE (296): Xaa equals any of the naturally occurring L-amino acids
SARASDLGAPRTWTGAAAGPRTPSAHIPVPAQRATPGKARLDEVMAAAAXTSLSTSPLLLGAPVAAFSPEPGLEPWKEALVRPPGSYSSSSNSGDWGWDLASDQSSPSTPSPPLPPEAAHFLFGEPTLRKRKSPAQVMFQCLWKSCGKVLSTASAMQRHIRLVHLGRQAEPDQSDGEEDFYYTELDVGVDTLTDGLSSLTPVSPTASMPPAFPRLELPELLEPPALPSPLRPPAPPLPPPPVLSTVANPQSCHSDRVYQGCLTPARLEPQPTEVGACPPALSSRIGVTLRKPRGDXKKCRKVYGMERRDLWCTACRWKKACQRFLD

SEQ ID NO: 643 - protein, 129 aa, Homo sapiens
  SITE (9): Xaa equals any of the naturally occurring L-amino acids
  SITE (10): Xaa equals any of the naturally occurring L-amino acids
  SITE (14): Xaa equals any of the naturally occurring L-amino acids
  SITE (18): Xaa equals any of the naturally occurring L-amino acids
  SITE (19): Xaa equals any of the naturally occurring L-amino acids
  SITE (24): Xaa equals any of the naturally occurring L-amino acids
  SITE (38): Xaa equals any of the naturally occurring L-amino acids
  SITE (94): Xaa equals any of the naturally occurring L-amino acids
  SITE (103): Xaa equals any of the naturally occurring L-amino acids
DVRLSGRNXXVDVXDHQXXLLEQXDLLAGLISNSSDAXDKIRYESLTDPSKLDSGKELHINLIPNKQDRTLTIVGYRDRMTKADLINNLGTIAXSGTKAFMEXLQAGADISMIGQFGVGFYSAYLVARR

SEQ ID NO: 644 - protein, 156 aa, Homo sapiens
  SITE (12): Xaa equals any of the naturally occurring L-amino acids
STHASASRRLLXDVCQDCIQMVTDIQTAVRTNSTFVEALVDHAKAQCDLLGPGMADMCKNYINQYSDIAVQMMMHMQPKEICGLVGFCDQVKEMPMQTLIPAKAVSENVIPALELVEPIKKDTVQAKTSVSCGDMRVTWLKEVAKLHWTTTGLRKK

SEQ ID NO: 645 - protein, 115 aa, Homo sapiens
ADPGVGAVPGLAADLATAARSLGPALVLDLGRPPSPDPHEGPSPSPRRSPDLVRGPGPGLGPGVLPQCPRGNPNPGRDRRVPPSLLKRKERCPLKKMVMSGNPRHITLIHKWDLG

SEQ ID NO: 646 - protein, 153 aa, Homo sapiens
  SITE (127): Xaa equals any of the naturally occurring L-amino acids
YMPNGSLNELLHRKTEYPDVAWPLRFRILHEIALGVNYLHNMTPPLLHHDLKTQNILLDNEFHVKIADFGLSKWRMMSLSQSRSSKSAPEGGTIIYMPPENYEPGQKSRASIKHDIYSYAVITWEVXSRKQPFEDVTNPLQIMYSVSQGHWTG

SEQ ID NO: 647 - protein, 220 aa, Homo sapiens
ASEQGAVGQGGLAGVPTLTSLPSSCPEPRPSMDAVDATMEKLRAQCLSRGASGIQGLARFFRQLDRDGSRSLDADEFRQGLAKLGLVLDQAEAEGVCRKWDRNGSGTLDLEEFLRALRPPMSQAREAVIAAAFAKLDRSGDGVVTVDDLRGVYSGRAHPKVRSGEWTEDEVLRRFLDNFDSSEKDGQVTLAEFQDYYSGVSASMNTDEEFVAMMTSAWQL

SEQ ID NO: 648 - protein, 118 aa, Homo sapiens
DNRTLTKGPDTVGTMGQCRSANAEDAQEFSDVERAIETLIKNFHQYSVEGGKETLTPSELRDLVTQQLPHLMPSNCGLEEKIANLGSCNDSKLEFRSFWELIGEAAKSVKLERPVRGH

SEQ ID NO: 649 - protein, 309 aa, Homo sapiens
  SITE (77): Xaa equals any of the naturally occurring L-amino acids
  SITE (160): Xaa equals any of the naturally occurring L-amino acids
DHHQGAESVPGIGVSPTSSSSCPPTSCTQPVTTWSPGLRVESLDGAKTGKGALTGAPGSFGSSEFLTGLRNTSEARXTRGPIMQEPRRVTPCLGKRGVKTPQLQPGSAFLPRVRRQSFPARSDSYTTVRDFLAVPRTISSASATLIMAVAVSHFRPGPEXWDTASMAASKVKQDMPPPGGYGPIDYKRNLPRRGLSGYSMLAIGIGTLIYGHWSIMKWNRERRRLQIEDFEARIALLPLLQAETDRRTLQMLRENLEEEAIIMKDVPDWKVGESVFHTTRWVPPLIGELYGLRTTEEALHASHGFMWYT

SEQ ID NO: 650 - protein, 286 aa, Homo sapiens
IPTLITAFVLATSQAQAGWLQHDYGHLSVYRKPKWNHLVHKFVIGHLKGASANWWNHRHFQHHAKPNIFHKDPDVNMLHVFVLGEWQPIEYGKKKLKYLPYNHQHEYFFLIGPPLLIPMYFQYQIIMTMIVHKNWVDLAWAVSYYIRFFITYIPFYGILGALLFLNFIRFLESHWFVWVTQMNHIVMEIDQEAYRDWFSSQLTATCNVEQSFFNDWFSGHLNFQIEHHLFPTMPRHNLHKIAPLVKSLCAKHGIEYQEKPLLRALLDIIRSLKKSGKLWLDAYLHK

SEQ ID NO: 651 - protein, 184 aa, Homo sapiens
  SITE (35): Xaa equals any of the naturally occurring L-amino acids
  SITE (57): Xaa equals any of the naturally occurring L-amino acids
  SITE (71): Xaa equals any of the naturally occurring L-amino acids
  SITE (106): Xaa equals any of the naturally occurring L-amino acids
ERGPIPVCPHKAASSVISLLRAELRLYTDPHKYHXFCLRKDKAHVCFCFRFLFSFFXEALWRSMFLLSFLXKPSFWATGLILSTSSFPPFSIVSLPPSHPTRAPLXLSFPSSPAVSFLRSGTKLIFRRRPRQKEAGLSQSHDDLSNATATPSVRKKAGSFSRRLIKRFSFKSKPKANGNPSPQL

SEQ ID NO: 652 - protein, 641 aa, Homo sapiens
  SITE (438): Xaa equals any of the naturally occurring L-amino acids
QGSEPSSENANDTIILRNLNPHSTMDSILGALAPYAVLSSSNVRVIKDKQTQLNRGFAFIQLSTIEAAQLLQILQALHPPLTIDGKTINVEFAKGSKRDMASNEGSRISAASVASTAIAAAQWAISQASQGGEGTWATSEEPPVDYSYYQQDEGYGNSQGTESSLYAHGYLKGTKGPGITGTKGDPTGAGPEASLEPGADSVSMQAFSRAQPGAAPGIYQQSAEASSSQGTAANSQSYTIMSPAVLKSELQSPTHPSSALPPATSPTAQESYSQYPVPDVSTYQYDETSGYYYDPQTGLYYDPNSQYYYNAQSQQYLYWDGERRTYVPALEQSADGHKETGAPSKEGKEKKEKHKTKTAQQIAKDMERWARSLNKQKENFKNSFQPISSLRDDERRESATADAGYAILEKKGALAERQHTSMDLPKLASDDRPSPPRXLVAAYSGESDSEEEQERGGPEREEKLTDWQKLACLLCRRQFPSKEALIRHQQLSGLHKQNLEIHRRAHLSENELEALEKNDMEQMKYRDRAAERREKYGIPEPPEPKRRKYGGISTASVDFEQPTRDGLGSDNIGSRMLQAMGWKEGSGLGRKKQGIVTPIEAQTRVRGSGLGARGSSYGVTSTESYKETLHKTMVTRFNEAQ

SEQ ID NO: 653 - protein, 516 aa, Homo sapiens
  SITE (1): Xaa equals any of the naturally occurring L-amino acids
  SITE (247): Xaa equals any of the naturally occurring L-amino acids
XTRPGRQTRLCRPAISLLWLVTPGVPAFSGWGRRHRGRTGRRAMASCVGSRTLSKDDVNYKMHFRMINEQQVEDITIDFFYRPHTITLLSFTIVSLMYFAFTRDDSVPEDNIWRGILSVIFFFLIISVLAFPNGPFTRPHPALWRMVFGLSVLYFLFLVFLLFLNFEQVKSLMYWLDPNLRYATREADVMEYAVNCHVITWERIISHFDIFAFGHFWGWAMKALLIRSYGLCWTISITWELTELFFXHLLPNFAECWWDQVILDILLCNGGGIWLGMVVCRFLEMRTYHWASFKDIHTTTGKIKRAVLQFTPASWTYVRWFDPKSSFQRVAGVYLFMIIWQLTELNTFFLKHIFVFQASHPLSWGRILFIGGITAPTVRQYYAYLTDTQCKRVGTQCWVFGVIGFLEAIVCIKFGQDLFSKTQILYVVLWLLCVAFTTFLCLYGMIWYAEHYGHREKTYSECEDGTYSPEISWHHRKGTKGSEDSPPKHAGNNESHSSRRRNRHSKSKVTNGVGKK

SEQ ID NO: 654 - protein, 663 aa, Homo sapiens
LECREAHIRDVPVVRLPADSPIPERGDLSCRMHTCFDVYRCGFNPKNKIKVYIYALKKYVDDFGVSVSNTISREYNELLMAISDSDYYTDDINRACLFVPSIDVLNQNTLRIKETAQAMAQLSRWDRGTNHLLFNMLPGGPPDYNTALDVPRDRALLAGGGFSTWTYRQGYDVSIPVYSPLSAEVDLPEKGPGPRQYFLLSSQVGLHPEYREDLEALQVKHGESVLVLDKCTNLSEGVLSVRKRCHKHQVFDYPQVLQEATFCVVLRGARLGQAVLSDVLQAGCVPVVIADSYILPFSEVLDWKRASVVVPEEKMSDVYSILQSIPQRQIEEMQRQARWFWEAYFQSIKAIALATLQIINDRIYPYAAISYEEWNDPPAVKWGSVSNPLFLPLIPPQSQGFTAIVLTYDRVESLFRVITEVSKVPSLSKLLVVWNNQNKNPPEDSLWPKIRVPLKVVRTAENKLSNRFFPYDEIETEAVLAIDDDIIMLTSDELQFGYEVWREFPDRLVGYPGRLHLWDHEMNKWKYESEWTNEVSMVLTGAAFYHKYFNYLYTYKMPGDIKNWVDAHMNCEDIAMNFLVANVTGKAVIKVTPRKKFKCPECTAIDGLSLDQTHMVERSECINKFASVFGTMPLKVVEHRADPVLYKDDFPEKLKSFPNIGSL

SEQ ID NO: 655 - protein, 97 aa, Homo sapiens
  SITE (38): Xaa equals any of the naturally occurring L-amino acids
  SITE (91): Xaa equals any of the naturally occurring L-amino acids
ATQLLSSFSVGPLLQITFYEDKNFQGRRYDCDCDCADXHTYLSRCNSIKVEGGTWAVYERPNFAGYMYILPQGEYPEYQRWMGLNDRLSSXRAVSSA

SEQ ID NO: 656 - protein, 167 aa, Homo sapiens
  SITE (59): Xaa equals any of the naturally occurring L-amino acids
  SITE (73): Xaa equals any of the naturally occurring L-amino acids
DADLVIWDPDSVKTISAKTHNSSLEYNIFEGMECRGSPLVVISQGKIVLEDGTLHVTEXSGRYIPRKPFPDFXYKRIKARSRLAELRGVPRGLYDGPVCEVSVTPKTVTPASSAKTSPAKQQAPPVRNLHQSGFSLSGAQIDDNIPRRTTQRIVAPPGGRANITSLG

SEQ ID NO: 657 - protein, 176 aa, Homo sapiens
  SITE (1): Xaa equals any of the naturally occurring L-amino acids
  SITE (6): Xaa equals any of the naturally occurring L-amino acids
  SITE (26): Xaa equals any of the naturally occurring L-amino acids
XSLNLXKLALHRGGGRSRTSGSPGLXEFGTSAVLLRLGDELEMIRPSVYRNVARQLHISLQSEPVVTDAFLAVAGHIFSAGITWGKVVSLYAVAAGLAVDCVRQAQPAMVHALVDCLGEFVRKTLATWLRRRGGWTDVLKCVVSTDPGLRSHWLVAALCSFGRFLKAAFFVLLPER

SEQ ID NO: 658 - protein, 137 aa, Homo sapiens
  SITE (75): Xaa equals any of the naturally occurring L-amino acids
  SITE (91): Xaa equals any of the naturally occurring L-amino acids
  SITE (101): Xaa equals any of the naturally occurring L-amino acids
  SITE (124): Xaa equals any of the naturally occurring L-amino acids
  SITE (129): Xaa equals any of the naturally occurring L-amino acids
  SITE (131): Xaa equals any of the naturally occurring L-amino acids
GPVGSSSEAPRGAGDAGMAGELTPEEEAQYKKAFSAVDTDGNGTINAQELGAALKATGKNLSEAQLRKLISEVDXDGDGEISFQEFLTAAXKARAGLEDLXVAFRAFDQDGDGHITVDELRRAXAGLGXLXEIDHFG

SEQ ID NO: 659 - protein, 34 aa, Homo sapiens
  SITE (2): Xaa equals any of the naturally occurring L-amino acids
  SITE (28): Xaa equals any of the naturally occurring L-amino acids
  SITE (30): Xaa equals any of the naturally occurring L-amino acids
PXSRQDVMDIVFIEQLSVITTIGVYDWXQXSNRS

SEQ ID NO: 660 - protein, 56 aa, Homo sapiens
NPISPKNYKKISQAQSQLPVIPATQEAESGESLGPGAAEVNSEPRLHHRTPAWITK

SEQ ID NO: 661 - protein, 41 aa, Homo sapiens
  SITE (29): Xaa equals any of the naturally occurring L-amino acids
  SITE (31): Xaa equals any of the naturally occurring L-amino acids
  SITE (36): Xaa equals any of the naturally occurring L-amino acids
  SITE (39): Xaa equals any of the naturally occurring L-amino acids
YIGFVILVFFASSYVKEIDNKILNNKKKXKXSSKGXVAXAI

SEQ ID NO: 662 - protein, 524 aa, Homo sapiens
  SITE (124): Xaa equals any of the naturally occurring L-amino acids
  SITE (191): Xaa equals any of the naturally occurring L-amino acids
CEAWRGRADPGGQSCLQALQNSTAPQHPGLHRWTGDRKMPPRRDRGCDPVGNIPQGESGGWWPEGAGDLLGATPDRESPQLPGQRLQPHPQQCLHGRRVRGPSWRVEAWGPGLHVFGPGQRWGXSPQGIPELEQYDPPELADSSGRVVREKWSADMWRLGCLIWEVFNGPLPRAAALRNPGKIPKTLVPHXCKLVGANPKVRPNPARFLQNCRAPGGFMSNRFVETNLFLEEIQIKEPAEKQKFFQELSKSLDAFPEDFCRHKVLPQLLTAFEFGNAGAVVLTPLFKVGKFLSAEEYQQKIIPVVVKMFSSTDRAMRIRLLQQMEQFIQYLDEPTVNTQIFPHVVHGFLDTNPAIREQTVKSMLLLAPKLNEANLNVELMKHFARLQAKDEQGPIRCNTTVCLGKIGSYLSASTRHRVLTSAFSRATRDPFAPSRVAGVLGFAATHNLYSMNDCAQKILPVLCGLTVDPEKSVRDQAFKAFGASCPNWSLCRRTRPSWRKWRRMSMQPPALAWEEPQLAGQAGP

SEQ ID NO: 663 - protein, 272 aa, Homo sapiens
  SITE (29): Xaa equals any of the naturally occurring L-amino acids
PTLDSARSLSMRAPSLTPSAAPLSTWPLXILVRSGHNRAVDWWSLGALMYDMLTGSPPFTAENRKKTMDKIIRGKLALPPYLTPDARDLVKKFLKRNPSQRIGGGPGDAADVQRHPFFRHMNWDDLLAWRVDPPFRPCLQSEEDVSQFDTRFTRQTPVDSPDDTALSESANQAFLGFTYVAPSVLDSIKEGFSFQPKLRSPRRLNSSPRAPVSPLKFSPFEGFRPSPSLPEPTELPLPPLLPPPPPSTTAPLPIRPPSGTKKSKRGRGRPGR

SEQ ID NO: 664 - protein, 256 aa, Homo sapiens
  SITE (99): Xaa equals any of the naturally occurring L-amino acids
GTRRETWRPGSMAGLELLSDQGYRVDGRRAGELRKIQARMGVFAQADGSAYIEQGNTKALAVVYGPHEIRGSRARALPDRALVNCQYSSATFSTGERKXRPHGDRKSCEMGLQLRQTFEAAILTQLHPRSQIDIYVQVLQADGGTYAACVNAATLAVLDAGIPMRDFVCACSAGFVDGTALADLSHVEEAAGGPQLALALLPASGQIALLEMDARLHEDHLERVLEAAAQAARDVHTLLDRVVRQHVREASILLGD

SEQ ID NO: 665 - protein, 241 aa, Homo sapiens
  SITE (9): Xaa equals any of the naturally occurring L-amino acids
  SITE (122): Xaa equals any of the naturally occurring L-amino acids
PRGDKARTXPPAASARPSRSKRGGEERVLEKEEEEDDDEDEDEEDDVSEGSEVPESDRPAGAQHHQLNGERGPQSAKERVKEWTPCGPHQGQDEGRGPAPGSGTRQVFSMAAMNKEGGTASXATGPDSPSPVPLPPGKPALPGADGTPFGCPPGRKEKPSDPVEWTVMDVVEYFTEAGFPEQATVFQEQEIDGKSLLLMQRTDVLTGLSIRLGPALKIYEHHIKVLQQGHFEDDDPDGFLG

SEQ ID NO: 666 - protein, 131 aa, Homo sapiens
VTGGGAVVLGAESHASKDVAIDMMDSRTSQQLQLIDEQDSYIQSRADTMQNIESTIVELGSIFQQLAHMVKEQEETIQRIDENVLGAQLDVEAAHSEILKYFQSVTSNRWLMVKIFLILIVFFIIFVVFLA

SEQ ID NO: 667 - protein, 652 aa, Homo sapiens
LSWNRYTSVSPLHRSLQLPPRVSGVRCDQCARGFSGIFPACHPCHACFGDWDRVVQDLAARTQRLEQRAQELQQTGVLGAFESSFWHMQEKLGIVQGIVGARNTSAASTAQLVEATEELRREIGEATEHLTQLEADLTDVQDENFNANHALSGLERDRLALNLTLRQLDQHLDLLKHSNFLGAYDSIRHAHSQSAEAERRANTSALAVPSPVSNSASARHRTEALMDAQKEDFNSKHMANQRALGKLSAHTHTLSLTDINELVCGAPGDAPCATSPCGGAGCRDEDGQPRCGGLSCNGAAATADLALGRARHTQAELQRALAEGGSILSRVAETRRQASEAQQRAQAALDKANASRGQVEQANQELQELIQSVKDFLNQEGADPDSIEMVATRVLELSIPASAEQIQHLAGAIAERVRSLADVDAILARTVGDVRRAEQLLQDARRARSWAEDEKQKAETVQAALEEAQRAQGIAQGAIRGAVADTRDTEQTLYQVQERMAGAERALSSAGERARQLDALLEALKLKRAGNSLAASTAEETAGSAQGRAQEAEQLLRGPLGDQYQTVKALAERKAQGVLAAQARAEQLRDEARDLLQAAQDKLQRLQELEGTYEENERALESKAAQLDGLEARMRSVLQAINLQVQIYNTCQ

SEQ ID NO: 668 - protein, 406 aa, Homo sapiens
  SITE (84): Xaa equals any of the naturally occurring L-amino acids
GAVRSSCAELQARVMAALRQPQVAECWPRPGEPSGRSSGPSPSWPCQRRAACNLIGEHTDYNQGLVLPMALELMTVLVGSPRKXGLVSLLTTSEGADEPQRLQFPLPTAQRSLEPGTPRWANYVKGVIQYYPAAPLPGFSAVVVSSVPLGGGLSSSASLEVATYTFLQQLCPDSGTIAARAQVCQQAEHSFAGMPCGIMDQFISLMGQKGHALLIDCRSLETSLVPLSDPKLAVLITNSNVRHSLASSEYPVRRRQCEEVARALGKESLREVQLEELEAARDLVSKEGFRRARHVVGEIRRTAQAAAALRRGDYRAFGRLMVESHRSLRDDYEVSCPELDQLVEAALAVPGVYGSRMTGGGFGGCTVTLLEASAAPHAMRHIQEHYGGTATFYLSQAADGAKVLCL

SEQ ID NO: 669 - protein, 86 aa, Homo sapiens
PEPTVVMAARALCMLGLVLALLSSSSAEEYVGLSANQCAVPAKDRVDCGYPHVTPKECNNRGCCFDSRIPGVPWCFKPLQEAECTF

SEQ ID NO: 670 - protein, 392 aa, Homo sapiens
  SITE (6): Xaa equals any of the naturally occurring L-amino acids
GGGARXSPATQPPPLLPPSATGPDATVGGPAPTPLLPPSATASVKMEPENKYLPELMAEKDSLDPSFTHAMQLLTAEIEKIQKGDSKKDDEENYLDLFSHKNMKLKERVLIPVKQYPKFNFVGKILGPQGNTIKRLQEETGAKISVLGKGSMRDKAKEEELRKGGDPKYAHLNMDLHVFIEVFGPPCEAYALMAHAMEEVKKFLVPDMMDDICQEQFLELSYLNGVPEPSRGRGVPVRGRGAAPPPPPVPRGRGVGPPRGALVRGTPVRGAITRGATVTRGVPPPPTVRGAPAPRARTAGIQRIPLPPPPAPETYEEYGYDDTYAEQSYEGYEGYYSQSQGDSEYYDYGHGEVQDSYEAYGQDDWNGTRPSLKAPPARPVKGAYREHPYGRY

SEQ ID NO: 671 - protein, 180 aa, Homo sapiens
RNMSSFSRAPQQWATFARIWYLLDGKMQPPGKLAAMASIRLQGLHKPVYHALSDCGDHVVIMNTRHIAFSGNKWEQKVYSSHTGYPGGFRQVTAAQLHLRDPVAIVKLAIYGMLPKNLHRRTMMERLHLFPDEYIPEDILKNLVEELPQPRKIPKRLDEYTQEEIDAFPRLWTPPEDYRL

SEQ ID NO: 672 - protein, 78 aa, Homo sapiens
ENYQFTYRRFFFPNSRFHPRPFEELQTLSLRKERGQPKINAKFAYTPSHSDVLVVTYYQCGREPKLHFRSKYSLCRYC

SEQ ID NO: 673 - protein, 139 aa, Homo sapiens
  SITE (113): Xaa equals any of the naturally occurring L-amino acids
  SITE (132): Xaa equals any of the naturally occurring L-amino acids
PTRPPLCRGAASRGLLCKWAPWPSAPVPATRDRAPRPARGRRPGRLGSTSSNSSCSSTECPGEAIPHPPGLPKADPGHWWASFFFGKSTLPFMATVLESAEHSEPPQASSSMXACGLAREAPRKQPGGQSSXASAGPPS

SEQ ID NO: 674 - protein, 279 aa, Homo sapiens
  SITE (7): Xaa equals any of the naturally occurring L-amino acids
  SITE (58): Xaa equals any of the naturally occurring L-amino acids
  SITE (193): Xaa equals any of the naturally occurring L-amino acids
ERAHSLXHGVDGEPCPEDYKYISENCETSTMNIDRNITHLQHCTFVDDCSSSNCLCGXFSIRCWYDKDGRLLQEFNKIEPPLIFECNQACSCWRNCKNRVVQSGIKVRLQLYRTAKMGWGVRALQTIPQGTFICEYVGELISDAEADVREDDSYLFDLDNKDGEVYCIDARYYGNISRFINHLCDPNIIPVRXFMLHQDLRFPRIAFFSSRDIRTGEELGFDYGDRFWDIKSKYFTCQCGSEKCKHSAEAIALEQSRLARLDPHPELLPELGSLPPVNT

SEQ ID NO: 675 - protein, 405 aa, Homo sapiens
  SITE (393): Xaa equals any of the naturally occurring L-amino acids
  SITE (394): Xaa equals any of the naturally occurring L-amino acids
RNTLGRGTTITLVLKEEASDYLELDTIKNLVKKYSQFINFPIYVWSSKTETVEEPMEEEEAAKEEKEESDDEAAVEEEEEEKKPKTKKVEKTVWDWELMNDIKPIWQRPSKEVEEDEYKAFYKSFSKESDDPMAYIHFTAEGEVTFKSILFVPTSAPRGLFDEYGSKKSDYIKLYVRRVFITDDFHDMMPKYLNFVKGVVDSDDLPLNVSRETLQQHKLLKVIRKKLVRKTLDMIKKIADDKYNDTFWKEFGTNIKLGVIEDHSNRTRLAKLLRFQSSHHPTDITSLDQYVERMKEKQDKIYFMAGSSRKEAESSPFVERLLKKGYEVIYLTEPVDEYCIQALPEFDGKRFQNVAKEGVKFDESEKTKESREAVEKEFEPLLNWMKDKALKGXXLWEILPICGKY

SEQ ID NO: 676 - protein, 465 aa, Homo sapiens
  SITE (5): Xaa equals any of the naturally occurring L-amino acids
  SITE (6): Xaa equals any of the naturally occurring L-amino acids
  SITE (16): Xaa equals any of the naturally occurring L-amino acids
NDSLXXKAGTPAGNRXGIPGSTHASAAAPFAAALARDPNPASPLPEHRPRLHRGPGPPARLAAAMADPKYADLPGIARNEPDVYETSDLPEDDQAEFDAEELTSTSVEHIIVNPNAAYDKFKDKRVGTKGLDFSDRIGKTKRTGYESGEYEMLGEGLGVKETPQQKYQRLLHEVQELTTEVEKIKTTVKESATEEKLTPVLLAKQLAALKQQLVASHLEKLLGPDAAINLTDPDGALAKRLLLQLEATKNSKGGSGGKTTGTPPDSSLVTYELHSRPEQDKFSQAAKVAELEKRLTELETAVRCDQDAQNPLSAGLQGACLMETVELLQAKVSALDLAVLDQVEARLQSVLGKVNEIAKHKASVEDADTQSKVHQLYETIQRWSPIASTLPELVQRLVTIKQLHEQAMQFGQLLTHLDTTQQMIANSLKDNTTLLTQVQTTMRENLATVEGNFASIDERMKKLGK

SEQ ID NO: 677 - protein, 48 aa, Homo sapiens
SSFLNSDLGLSLARNLAFSFTTKERDQKPLIFNFHKMLEVYIYIYIFL

SEQ ID NO: 678 - protein, 940 aa, Homo sapiens
VLGEGISFLLSPPLPTPSINIILLKILRCQAAKVESAIAEGGASRFSASSGGGGSRGAPQHYPKTAGNSEFLGKTPGQNAQKWIPARSTRRDDNSAANNSANEKERHDAIFRKVRGILNKLTPEKFDKLCLELLNVGVESKLILKGVILLIVDKALEEPKYSSLYAQLCLRLAEDAPNFDGPAAEGQPGQKQSTTFRRLLISKLQDEFENRTRNVDVYDKRENPLLPEEEEQRAIAKIKMLGNIKFIGELGKLDLIHESILHKCIKTLLEKKKRVQLKDMGEDLECLCQIMRTVGPRLDHERAKSLMDQYFARMCSLMLSKELPARIRFLLQDTVELREHHWVPRKAFLDNGPKTINQIRQDAVKDLGVFIPAPMAQGMRSDFFLEGPFMPPRMKMDRDPLGGLADMFGQMPGSGIGTGPGVIQDRFSPTMGRHRSNQLFNGHGGHIMPPTQSQFGEMGGKFMKSQGLSQLYHNQSQGLLSQLQGQSKDMPPRFSKKGQLNADEISLRPAQSFLMNKNQVPKLQPQITMIPPSAQPPRTQTPPLGQTPQLGLKTNPPLIQEKPAKTSKKPPPSKEELLKLTETVVTEYLNSGNANEAVNGVREMRAPKHFLPEMLSKVIILSLDRSDEDKEKASSLISLLKQEGIATSDNFMQAFLNVLDQCPKLEVDIPLVKSYLAQFAARAIISELVSISELAQPLESGTHFPLFLLCLQQLAKLQDREWLTELFQQSKVNMQKMLPEIDQNKDRMLEILEGKGLSFLFPLLKLEKELLKQIKLDPSPQTIYKWIKDNISPKLHVDKGFVNILMTSFLQYISSEVNPPSDETDSSSAPSKEQLEQEKQLLLSFKPVMQKFLHDHVDLQVSALYALQVHCYNSNFPKGMLLRFFVHFYDMEIIEEEAFLAWKEDITQEFPGKGKALFQVNQWLTWLETAEEEESEEEAD

SEQ ID NO: 679 - protein, 212 aa, Homo sapiens
  SITE (7): Xaa equals any of the naturally occurring L-amino acids
  SITE (160): Xaa equals any of the naturally occurring L-amino acids
  SITE (172): Xaa equals any of the naturally occurring L-amino acids
SWKEEEXKPHLQGKPGRPLSPANVPALPGETVTSPVRLHPDYLSPEEIQRQLQDIERRLDALELRGVELEKRLRAAEGDDAEDSLMVDWFWLIHEKQLLLRQESELMYKSKAQRLEEQQLDIEGELRRLMAKPEALKSLQERRREQELLEQYVSTVNDRXDIVDSLDEDRLXEQEEDQMLRDMIEKLGLQRKKSKFRLSKIWSPKSKSSPSQ

SEQ ID NO: 680 - protein, 412 aa, Homo sapiens
  SITE (172): Xaa equals any of the naturally occurring L-amino acids
  SITE (404): Xaa equals any of the naturally occurring L-amino acids
VAVELGSLRGGTMASEKPLAAVTCTAPVNIAVIKYWGKRDEELVLPINSSLSVTLHQDQLKTTTTAVISKDFTEDRIWLNGREEDVGQPRLQACLREIRCLARKRRNSRDGDPLPSSLSCKVHVASVNNFPTAAGLASSAAGYACLAYTLARVYGVESDLSEVARRGSGSAXRSLYGGFVEWQMGEQADGKDSIARQVAPESHWPELRVLILVVSAEKKLTGSTVGMRASVETSPLLRFRAESVVPARMAEMARCIRERDFPSFAQLTMKDSNQFHATCLDTFPPISYLNAISWRIIHLVHRFNAHHGDTKVAYTFDAGPNAVIFTLDDTVAEFVAAVWHGFPPGSNGDTFLKGLQVRPAPLSAELQAALAMEPTPGGVKYIIVTQVGPGPQILDDPCAHLLGXDGLPKPAA

SEQ ID NO: 681 - protein, 61 aa, Homo sapiens
KKTRHLSKILCGKMTVNKMRVSGPFVLLSFFDYKFLLTHTIMSANPLLPRERNCAPSVLLP

SEQ ID NO: 682 - protein, 243 aa, Homo sapiens
SAPPPPRRKTAPPAHRQRPPPQSPTATGLGPAARSCLPQPPSRGPQPPPTLPHGPGAMSELEQLRQEAEQLRNQIRDARKACGDSTLTQITAGLDPVGRIQMRTRRTLRGHLAKIYAMHWGTDSRLLVSASQDGKLIIWDSYTTNKVHAIPLRSSWVMTCAYAPSGNFVACGGLDNICSIYSLKTREATSGSAGSCLATLGTCRVAASWMTTKSSPALGIPPVPCGTLRQASRQWVLLDTVGM

SEQ ID NO: 683 - protein, 146 aa, Homo sapiens
  SITE (133): Xaa equals any of the naturally occurring L-amino acids
DLEGDAGYTGGLRQGHAGGAGELARTLALKPTSLELFRTKVNALTYGEVLRLRQTERLHQEGTLAPPILELREKLKPELMGLIRQQRLLRLCEGTLFRKISSRRRQDKLWFCCLSPNHKLLQYGDMEEGASAXPWRVCPSNSLWPT

SEQ ID NO: 684 - protein, 300 aa, Homo sapiens
VYSCGFQVQSWSPRWIWVTTKSKIGAPRSSFCWHRLPSTSQLHLCPAEGEAPSAGEAAPRAPTGSEPKPGALPWGPRAPDSEGGGGAGAADPAANAGHGASSEAECGCQRTLRPMPSTPGPGAAAVRALGQLFHIACFTCHQCAQQLQGQQFYSLEGAPYCEGCYTDTLEKCNTCGEPITDRMLRATGKAYHPHCFTCVVCARPLEGTSFIVDQANRPHCVPDYHKQYAPRCSVCSEPIMPEPGRDETVRVVALDKNFHMKCYKCEDCGKPLSIEADDNGCFPLDGHVLCRKCHTARAQT

SEQ ID NO: 685 - protein, 130 aa, Homo sapiens
  SITE (61): Xaa equals any of the naturally occurring L-amino acids
IRHEDCPTPSQCVVARTLGKQQTVMAIATKIALQMNCKMGGELWRVDIPLKLVMIVGIDCXHDMTAGRRSIAGFVASINEGMTRWFSRCIFQDRGQELVDGLKVCLQAALRAWNSCNEYMPSRIIVYRVA

SEQ ID NO: 686 - protein, 207 aa, Homo sapiens
  SITE (84): Xaa equals any of the naturally occurring L-amino acids
IYQVYNALQEKVQAVCADVEKSERVVESCQAEVNKLRRQITQRKNEKEQERRLQQAVLSRQMPSESLDPAFSPRMPSSGFAAEXRSTLGDAEASDPPPPYSDFHPNNQESTLSHSRMERSVFMPRPQAVGSSNYASTSAGLKYPGSGADLPPPQRAAGDSGEDSDDSDYENLIDPTEPSNSEYSHSKDSRPMAHPDEDPRNTQTSQI

SEQ ID NO: 687 - protein, 101 aa, Homo sapiens
ARAGEEGVVTRWRHRLGQGACPWDRSRPMEPPGRSSRSTASHTLHQYCCPTQVLDSMKLTPSGRLAESREEEEEEETEEEEEEDAHQFCCPASECSSPSSR

SEQ ID NO: 688 - protein, 62 aa, Homo sapiens
ERNADPPDVSLGKAVNQLIFIEDLLCPLHRVASVRESWFFPRNTDFLSGRLHVFIYFHHSRF

SEQ ID NO: 689 - protein, 549 aa, Homo sapiens
  SITE (1): Xaa equals any of the naturally occurring L-amino acids
  SITE (7): Xaa equals any of the naturally occurring L-amino acids
XRWACGXLLLLVRGQGQDSASPIRTTHTGQVLGSLVHVKGANAGVQTFLGIPFAKPPLGPLRFAPPEPPESWSGVRDGTTHPAMCLQDLTAVESEFLSQFNMTFPSDSMSEDCLYLSIYTPAHSHEGSNLPVMVWIHGGALVFGMASLYDGSMLAALENVVVVIIQYRLGVLGFFSTGDKHATGNWGYLDQVAALRWVQQNIAHFGGNPDRVTIFGESAGGTSVSSLVVSPISQGLFHGAIMESGVALLPGLIASSADVISTVVANLSACDQVDSEALVGCLRGKSKEEILAINKPFKMIPGVVDGVFLPRHPQELLASADFQPVPSIVGVNNNEFGWLIPKVMRIYDTQKEMDREASQAALQKMLTLLMLPPTFGDLLREEYIGDNGDPQTLQAQFQEMMADSMFVIPALQVAHFQCSRAPVYFYEFQHQPSWLKNIRPPHMKADHGDELPFVFRSFFGGNYIKFTEEEEQLSRKMMKYWANFARNGNPNGEGLPHWPLFDQEEQYLQLNLQPAVGRALKAHRLQFWKKALPQKIQELEEPEERHTEL

SEQ ID NO: 690 - protein, 155 aa, Homo sapiens
  SITE (36): Xaa equals any of the naturally occurring L-amino acids
  SITE (46): Xaa equals any of the naturally occurring L-amino acids
  SITE (50): Xaa equals any of the naturally occurring L-amino acids
  SITE (85): Xaa equals any of the naturally occurring L-amino acids
SHRVTHCPYAVALPEVAPAQPLTEALRALCHVGLFXFAFCALFDCXRPVXQKSCDLLLFLRDKIASYSSLREARGSPNTASAEAXLPRWRAGEQAQPPGDQEPEAVLAMLRSLDLEGLRSTLAESSDHVEKSPQSLLQDMLATGGFLQGDEADCY

SEQ ID NO: 691 - protein, 149 aa, Homo sapiens
MCLERPLREGPRVMEKEAWPGSLEGRGGGWRHLDCPLLSHTWGVVTPFTPARLPSAFHELHLLPTSLWRGWGPLASTRGPSASPKPEPSAPGENKWLSFDTWGRREAAGWRQSQGRDTTEGDPDIPRKFPAEQTAFQPEACLNCVMCNN

SEQ ID NO: 692 - protein, 218 aa, Homo sapiens
  SITE (160): Xaa equals any of the naturally occurring L-amino acids
PGVKLWDVPVMLDHKDLEAEIHPLKNEERKSQENLGNPSKNEDNVKSAPPQSRLSRCRAAAFFLSLFLCLFVVFVVSFVIPCPDRPASQRMWRIDYSAAVIYDFLAVDDINGDRIQDVLFLYKNTNSSNNFSRSCVDEGFSSPCTFAAAVSGANAARSGXDLWPKTWPSWSVLCPSQEAVRHLLPASWWADPVLSLQSTCSQGKPWKPQPAVQGEWSI

SEQ ID NO: 693 - protein, 68 aa, Homo sapiens
SCNSSNNILQLPYRNRSGRAKSDLGKVIRYRLSIPFPKMLGTRSISDFIIFFKVWNICIILTSWASQI

SEQ ID NO: 694 - protein, 234 aa, Homo sapiens
  SITE (3): Xaa equals any of the naturally occurring L-amino acids
  SITE (4): Xaa equals any of the naturally occurring L-amino acids
  SITE (219): Xaa equals any of the naturally occurring L-amino acids
CAXXLRGFDQQMSSMVIEHMASHGTRFLRGCAPSRVRRLPDGQLQVTWEDSTTGKEDTGTFDTVLWAIGRVPDTRSLNLEKAGVDTSPDTQKILVDSREATSVPHIYAIGDVVEGRPELTPTAIMAGRLLVQRLFGGSSDLMDYDNVPTTVFTPLEYGCVGLSEEEAVARHGQEHVEVYHAHYKPLEFTVAGRDASQCYVKMVCLREPPQLVLGLHFLXPTQANYSRICSGDKC

SEQ ID NO: 695 - protein, 460 aa, Homo sapiens
PCPPRPQELPGRSPSSWSALGWPAALGGGVVAVAVCEPVARLLWAGTLKIAAMAENGDNEKMAALEAKICHQIEYYFGDFNLPRDKFLKEQIKLDEGWVPLEIMIKFNRLNRLTTDFNVIVEALSKSKAELMEISEDKTKIRRSPSKPLPEVTDEYKNDVKNRSVYIKGFPTDATLDDIKEWLEDKGQVLNIQMRRTLHKAFKGSIFVVFDSIESAKKFVETPGQKYKETDLLILFKDDYFAKKNEERKQNKVEAKLRAKQEQEAKQKLEEDAEMKSLEEKIGCLLKFSGDLDDQTCREDLHILFSNHGEIKWIDFVRGAKEGIILFKEKAKEALGKAKDANNGNLQLRNKEVTWEVLEGEVEKEALKKIIEDQQESLNKWKSKGRRFKGKGKGNKAAQPGSGKGKVQFQGKKTKFASDDEHDEHDENGATGPVKRAREETDKEEPASKQQKTENGAGDQ

SEQ ID NO: 696 - protein, 80 aa, Homo sapiens
GEEGVGSPSGILATPLRSARGTTHTHTHTHTHTHSHTHAHFPSFPDPLFQSSPFSSGFIDEYKYPHLWPVMSVTCCRFCV

SEQ ID NO: 697 - protein, 257 aa, Homo sapiens
  SITE (30): Xaa equals any of the naturally occurring L-amino acids
WPRRPGPHLGVLEFPGAGCGASAAGWPSAXMLPGRGPRPFRARLVGRELVSMLARELPAAVAPAGPASLARWTLGFCDERLVPFDHAESTYGLYRTHLLSRLPIPESQVITINPELPVEEAAEDYAKKLRQAFQGDSIPVFDLLILGVGPDGHTCSLFPDHPLLQEREKIVAPISDSPKPPPQRVTLTLPVLNAARTVIFVATGEGKAAVLKRILEDQEENPLPAALVQPHTGKLCWFLDEAAARLLTVPFEKHSTL

SEQ ID NO: 698 - protein, 68 aa, Homo sapiens [sequence omitted]

SEQ ID NO: 699 - protein, 360 aa, Homo sapiens
PCSATTAWVKSSIKTHLCASLRHIRFLLSVCLLCLVAGTAVAVKMASTSRLDALPRVTCPNHPDAILVEDYRAGDMICPECGLVVGDRVIDVGSEWRTFSNDKATKDPSRVGDSQNPLLSDGDLSTMIGKGTGAASFDEFGNSKYQNRRTMSSSDRAMMNAFKEITTMADRINLPRNIVDRTNNLFKQVYEQKSLKGRANDAIASACLYIACRQEGVPRTFKEICAVSRISKKEIGRCFKLILKALETSVDLITTGDFMSRFCSNLCLPKQVQMAATHIARKAVELDLVPGRSPISVAAAAIYMASQASAEKRTQKEIGDIAGVADVTIRQSYRLIYPRAPDLFPTDFKFDTPVDKLPQL

SEQ ID NO: 700 - protein, 364 aa, Homo sapiens
  SITE (13): Xaa equals any of the naturally occurring L-amino acids
  SITE (30): Xaa equals any of the naturally occurring L-amino acids
  SITE (353): Xaa equals any of the naturally occurring L-amino acids
  SITE (360): Xaa equals any of the naturally occurring L-amino acids
PSWLRARSSRSWXASPRGPQPPRIRARSAXPMEGARVFGALGPIGPSSPGLTLGGLAVSEHRLSNKLLAWSGVLEWQEKRRPYSDSTAKLKRTLPCQAYVNQGENLETDQWPQKLIMQLIPQQLLTTLGPLFRNSQLAQFHFTNRDCDSLKGLCRIMGNGFAGCMLFPHISPCEVRVLMLLYSSKKKIFMGLIPYDQSGFVSAIRQVITTRKQAVGPGGVNSGPVQIVNNKFLAWSGVMEWQEPRPEPNSRSKRWLPSHVYVNQGEILRTEQWPRKLYMQLIPQQLLTTLVPLFRNSRLVQFHFTKDLETLKSLCRIMDNGFAGCVHFSYKASCEIRVLMLLYSSEKKIFIGXIPHDQGXFVQR

SEQ ID NO: 701 - protein, 156 aa, Homo sapiens
  SITE (33): Xaa equals any of the naturally occurring L-amino acids
GTRGILHVAVPARGTHAQCCRNWTVPDSGQGKXVMLEGQGRLERVHIPLSAPASATVQRPTGPQPVACPHCPVPTSNSPQPLVASVPCPLGFSSQPSGLGLCRKVMPTGTLLTPGSFMDVVSELRTRGCQMFLAPHVSFRTEQKHKDSAKSSLYSL

SEQ ID NO: 702 - protein, 150 aa, Homo sapiens
AGHGLGVRAGLKEFATNLTESGVHGALLALDETFDYSDLALLLQIPTQNAQARQLLEKEFSNLISLGTDRRLDEDSAKSFSRSPSWRKMFREKDLRGVTPDSAEMLPPNFRSAAAGALGSPGLPLRKLQPEGQTSGSSRADGVSVRTYSC

SEQ ID NO: 703 - protein, 527 aa, Homo sapiens
  SITE (243): Xaa equals any of the naturally occurring L-amino acids
  SITE (257): Xaa equals any of the naturally occurring L-amino acids
  SITE (259): Xaa equals any of the naturally occurring L-amino acids
  SITE (471): Xaa equals any of the naturally occurring L-amino acids
  SITE (477): Xaa equals any of the naturally occurring L-amino acids
  SITE (480): Xaa equals any of the naturally occurring L-amino acids
  SITE (484): Xaa equals any of the naturally occurring L-amino acids
  SITE (511): Xaa equals any of the naturally occurring L-amino acids
  SITE (519): Xaa equals any of the naturally occurring L-amino acids
CVCVEGVEGPRCDKCTRGYSGVFPDCTPCHQCFALWDVIIAELTNRTHRFLEKAKALKISGVIGPYRETVDSVERKVSEIKDILAQSPAAEPLKNIGNLFEEAEKLIKDVTEMMAQVEVKLSDTTSQSNSTAKELDSLQTEAESLDNTVKELAEQLEFIKNSDIRGALDSITKYFQMSLEAEERVNASTTEPNSTVEQSALMRDRVEDVMMERESQFKEKQEEQARLLDELAGKLQSLDLSAXAEMTCGTPPGASCXEXECGGPNCRTDEGERKCGGPGCGGLVTVAHNAWQKAMDLDQDVLSALAEVEQLSKMVSEAKLRADEAKQSAEDILLKTNATKEKMDKSNEELRNLIKQIRNFLTQDSADLDSIEAVANEVLKMEMPSTPQQLQNLTEDIRERVESLSQVEVILQHSAADIARAEMLLEEAKRASKSATDVKVTADMVKEALEEAEKAQVAAEKAIKQADEDIXRNPEPXNFXLEFXKQQLSGGNLVQRVPRASSEFREDVGRXLSGKLAQXPGGGRIFW

SEQ ID NO: 704 - protein, 62 aa, Homo sapiens
VYQRKSTVVLGGFLLWDIDFLFFFRNIVCCNLNKNYDILRYFIDKPNKNICFYFKVNVFLFS

SEQ ID NO: 705 - protein, 44 aa, Homo sapiens
TEDLFGFKHLLRQYLLGKPNIANGQFDFNFSKDTLLSRRLKCLH

SEQ ID NO: 706 - protein, 193 aa, Homo sapiens
  SITE (1): Xaa equals any of the naturally occurring L-amino acids
XGRAWVMAAPGALLVMGVSGSGKSTVGALLASELGWKFYDADDYHPEENRRKMGKGIPLNDQDRIPWLCNLHDILLRDVASGQRVVLACSALKKTYRDILTQGKDGVALKCEESGKEAKQAEMQLLVVHLSGSFEVISGRLLKREGHFMPPELLQSQFETLEPPAAPENFIQISVDKNVSEIIATIMETLKMK

SEQ ID NO: 707 - protein, 121 aa, Homo sapiens
  SITE (102): Xaa equals any of the naturally occurring L-amino acids
  SITE (103): Xaa equals any of the naturally occurring L-amino acids
GIRGQTLWLGPLGATLWPLGALETSHVLWALWRALALHGGAGRHCLPCPLPAAPALVCRLGPGCLLLGVWPRAPVKPWRHCVCVMGSEGLVGAVHWSSSLPXXAISMAPFAAEDTHCGSVG

SEQ ID NO: 708 - protein, 112 aa, Homo sapiens
NSFCYFHIRVQTYKGACSLKVHNYSYSVCLYCYRMLCFGALSSADPRSSVEIHCLGHSLIRMLAGDFVSDVASLFSVHRLRVTTVACRVHPVGAAQLSESKNLPTYSNVFAL

SEQ ID NO: 709 - protein, 72 aa, Homo sapiens
RRVWVLFPPQRPESGWGVSPVEGETVPALRGMKKSVGLPVAVQCVALPWQEELCLRFMREVERLMTPEKQSS

SEQ ID NO: 710 - protein, 84 aa, Homo sapiens
RLHRYPEAMASKGLQDLKQQVEGTAQEAVSAAGAAAQQVVDQATEAGQKAMDQLAKTTQETIDKTANQASDTFSGIGKKFGLLK

SEQ ID NO: 711 - protein, 63 aa, Homo sapiens
RLHRYPEAMASKGLQDLKQQVEGTAQEAAMDQLAKTTQETIDKTANQASDTFSGIGKKFGLLK

SEQ ID NO: 712 - protein, 86 aa, Homo sapiens
RLANRAIMSHKQIYYSDKYDDEEFEYRHVMLPKDIAKLVPKTHLMSESEWRNLGVQQSQGWVHYMIHEPEPHILLFRRPLPKKPKK

SEQ ID NO: 713 - protein, 193 aa, Homo sapiens
  SITE (129): Xaa equals any of the naturally occurring L-amino acids
VQKAGARALAVAGAARTPRSLPGRPAVCNMTLEEFSAGEQKTERMDKVGDALEEVLSKALSQRTITVGVYEAAKLLNVDPDNVVLCLLAADEDDDRDVALQIHFTLIQAFCCENDINILRVTTRAGWRXPALGDRRWPRGERGRRAAPGPALRVVTNPHSSQWKDPALSQLICFCRESRYMDQWVPVINLPER

SEQ ID NO: 714 - protein, 200 aa, Homo sapiens
  SITE (90): Xaa equals any of the naturally occurring L-amino acids
  SITE (93): Xaa equals any of the naturally occurring L-amino acids
  SITE (190): Xaa equals any of the naturally occurring L-amino acids
GPGACSGPAPSPRRPQSVKCEPRRRGRIWPGAGGGVGAARHVHHHQGAQQAGRAAPHRSHAAAGGGPARRAPEMPAARAADLAAPAGAAXCAXPGPWPLSSPGPRLVFNRVNGRRAPSTSPSFEGTQETYTVAHEENVRFVSEAWQQVQQQLDGGPAGEGGPRPVQYVERTPNPRLQNFVPIDLDEWWAXQFLARITSCS

SEQ ID NO: 715 - protein, 106 aa, Homo sapiens
  SITE (15): Xaa equals any of the naturally occurring L-amino acids
WIPRAAGIRHELVPXLWSREEAMATMENKVICALVLVSMLALGTLAEAQTETCTVAPRERQNCGFPGVTPSQCANKGCCFDDTVRGVPWCFYPNTIDVPPEEECEF

SEQ ID NO: 716 - protein, 105 aa, Homo sapiens
EGREAGSGLSVDSRDKGHEGRGLGPFRIPQDSQVQLCQKGTFHVMQLRGLSLNPRLLLTLGSFNQVGQPLLQRGVGWLSSLSHAACEDRGGGVGSGKSPENRRGI

SEQ ID NO: 717 - protein, 431 aa, Homo sapiens
RAAGIRHERGGPTGSCPGLPSPPMVLYIKYPGWRSHMLLTEGGNYHSSLGTRCELSCDRGFRLIGRRSVQCLPSRRWSGTAYCRQMRCHALPFITSGTYTCTNGVLLDSRCDYSCSSGYHLEGDRSRICMEDGRWSGGEPVCVDIDPPKIRCPHSREKMAEPEKLTARVYWDPPLVKDSADGTITRVTLRGPEPGSHFPEGEHVIRYTAYDRAYNRASCKFIVKVQVRRCPTLKPPQHGYLTCTSAGDNYGATCEYHCDGGYDRQGTPSRVCQSSRQWSGSPPICAPMKINVNVNSAAGLLDQFYEKQRLLIISAPDPSNRYYKMQISMLQQSTCGLDLRHVTIIELVGQPPQEVGRIREQQLSANIIEELRQFQRLTRSYFNMVLIDKQGIDRDRYMEPVTPEEIFTFIDDYLLSNQELTQRREQRDICE

SEQ ID NO: 718 - protein, 417 aa, Homo sapiens
QGLPDGVWAHGTCPGHRLVSSQRRIIASGSEDCTVMVWQIPENGLTSPLTEPVVVLEGHTKRVGIIAWHPTARNVLLSAGCDNVVLIWNVGTAEELYRLDSLHPDLIYNVSWNHNGSLFCSACKDKSVRIIDPRRGTLVAEREKAHEGARPMRAIFLADGKVFTTGFSRMSERQLALWDPENLEEPMALQELDSSNGALLPFYDPDTSVVYVCGKGDSSIRYFEITEEPPYIHFLNTFTSKEPQRGMGSMPKRGLEVSKCEIARFYKLHERKCEPIVMTVPRKSDLFQDDLYPDTAGPEAALEAEEWVSGRDADPILISLREAYVPSKQRDLKISRRNVLSDSRPAMAPGSSHLGAPASTTTAADATPSGSLARAGEAGKLEEVMQELRALRALVKEQGDRICRLEEQLGRMENGDA

SEQ ID NO: 719 - protein, 290 aa, Homo sapiens
  SITE (7): Xaa equals any of the naturally occurring L-amino acids
  SITE (74): Xaa equals any of the naturally occurring L-amino acids
  SITE (131): Xaa equals any of the naturally occurring L-amino acids
ELSASAXDDGNFSLLIRAVEETDAGLYTCNLHHHYCHLYESLAVRLEVTDGPPAPPPTGTARRRCWRWRAAPAXLTCVNRGHVWTDRHVEEAQQVVHWDRQPPGVPHDRADRLLDLYASASAALRAPFSAXRVAVGADAFKRGDFSLRIEPLEVADEGTYSCHLHHHYWRAATTSSMSSSPRAEPTSSSSWATCWPRCCSSSCYWSLSSWPPAGRGGYEYSDQKSGKSKGKDVNLAEFAVAAGDQMLYRSEDIQLDYKNNILKERAELAHSPLPAKYIDLDKGFRKENCK

SEQ ID NO: 720 - protein, 459 aa, Homo sapiens
  SITE (50): Xaa equals any of the naturally occurring L-amino acids
DAHPKPCCETSAAACRLVERILTSWEENDRVQCAGGPRKGYMGHLTRVAXALVQNTEKGPNAEQLRQLLKELPSEQQEQWEAFVSGPLAETNKKNMVDLVNTHHLHSSSDDEDDRLKEFNFPEEAVLQQAFMDFQMQRMTSAFIDHFGFNDEEFGEQEESVNAPFDKTANITFSLNADDENPNANLLEICYKDRIQQFDDDEEEEDEEEAQGSGESDGEDGAWQGSQLARGARLGQPPGVRSGGSTDSEDEEEEDEEEEEDEEGIGCAARGGATPLSYPSPGPQPPGPSWTATFDPVPTDAPTSPRVSGEEELHTGPPAPQGPLSVPQGLPTQSLASPPARDALQLRSQDPTPPSAPQEATEGSKVTEPSAPCQALVSIGDLQATFHGIRSAPSSSDSATRDPSTSVPASGAHQPPQTTEGEKSPEPLGLPQSQSAQALTPPPIPNGSAPEGPASPGSQ

SEQ ID NO: 721 - protein, 523 aa, Homo sapiens
  SITE (12): Xaa equals any of the naturally occurring L-amino acids
  SITE (115): Xaa equals any of the naturally occurring L-amino acids
  SITE (194): Xaa equals any of the naturally occurring L-amino acids
  SITE (327): Xaa equals any of the naturally occurring L-amino acids
LQRLKLIKPLLXFESLEECYMAKILVAEGTRDVPIGAIICITVGKPEDIEAFKNYTLDSSAAPTPQAAPAPTPAATASPPTPSAQAPGSSYPPHMQVLLPALSPTMTMGTVQRWXKKVGEKLSEGDLLAEIETDKATIGFEVQEEGYLAKILVPEGTRDVPLGTPLCIIVEKEADISAFADYRPTEVTDLKPQXPPPTPPPVAAVPPTPQPLAPTPSAPCPATPAGPKGRVFVSPLAKKLAVEKGIDLTQVKGTGPDGRITKKDIDSFVPSKVAPAPAAVVPPTGPGMAPVPTGVFTDIPISNIRRVIAQRLMQSKQTIPHYYLSIXVNMGEVLLVRKELNKILEGRSKISVNDFIIKASALACLKVPEANSSWMDTVIRQNHVVDVSVAVSTPAGLITPIVFNAHIKGVETIANDVVSLATKAREGKLQPHEFQGGTFTISNLGMFGIKNFSAIINPPQACILAIGASEDKLVPADNEKGFDVASMMSVTLSCDHRVVDGAVGAQWLAEFRKYLEKPITMLL

SEQ ID NO: 722 - protein, 111 aa, Homo sapiens
  SITE (10): Xaa equals any of the naturally occurring L-amino acids
SSRSRAADEXALCLQCDMNDCYSRLRRLVPTIPPNKKVSKVEILQHVIDYILDLQLALETHPALLRQPPPPAPPHHPAGTCPAAPPRTPLTALNTDPAGAVNKQGDSILCR

SEQ ID NO: 723 - protein, 190 aa, Homo sapiens
SGGGGGRMIKLFSLKQQKKEEESAGGTKGSSKKASAAQLRIQKDINELNLPKTCDISFSDPDDLLNFKLVICPDEGFYKSGKFVFSFKVGQGYPHDPPKVKCETMVYHPNIDLEGNVCLNILREDWKPVLTINSIIYGLQYLFLEPNPEDPLNKEAAEVLQNNRRLFEQNVQRSMRGGYIGSTYFERCLK

SEQ ID NO: 724 - protein, 524 aa, Homo sapiens
  SITE (247): Xaa equals any of the naturally occurring L-amino acids
  SITE (417): Xaa equals any of the naturally occurring L-amino acids
  SITE (440): Xaa equals any of the naturally occurring L-amino acids
  SITE (443): Xaa equals any of the naturally occurring L-amino acids
RRRRADRATPREVLETPGAASVQTLPSVTMKLWVSALLMAWFGVLSCVQAEFFTSIGHMTDLIYAEKELVQSLKEYILVEEAKLSKIKSWANKMEALTSKSAADAEGYLAHPVNAYKLVKRLNTDWPALEDLVLQDSAAGFIANLSVQRQFFPTDEDEIGAAKALMRLQDTYRLDPGTISRGELPGTKYQAMLSVDDCFGMGRSAYNEGDYYHTVLWMEQVLKQLDAGEEATTTKSQVLDYLSYAVXQLGDLHRALELTRRLLSLDPSHERAGGNLRYFEQLLEEEREKTLTNQTEAELATPEGIYERPVDYLPERDVYESLCRGEGVKLTPRRQKRLFCRYHHGNRAPQLLIAPFKEEDEWDSPHIVRYYDVMSDEEIERIKEIAKPKLARATVRDPKTGVLTVASYRVSKSSWLXEDDDPVVARVNRRMQHITGLTVXTAXLLQVANYGVGGQYEPHFDFSRNDERDTFKHLGTGNRVATFLNYMSDVEAGGATVFPDLGAAIWPKKGTAVFWYNLLRSGRR

SEQ ID NO: 725 - protein, 92 aa, Homo sapiens
LKMTSLFAQEIRLSKRHEEIVSQRLMLLQQMENKLGDQHTEKASQLQTVETAFKRNLSLLKDIEAAEKSLQTRIHPLPRPEVVSLETRYWAS

SEQ ID NO: 726 - protein, 690 aa, Homo sapiens
  SITE (108): Xaa equals any of the naturally occurring L-amino acids
  SITE (123): Xaa equals any of the naturally occurring L-amino acids
  SITE (383): Xaa equals any of the naturally occurring L-amino acids
  SITE (688): Xaa equals any of the naturally occurring L-amino acids
  SITE (690): Xaa equals any of the naturally occurring L-amino acids
VSRSPRVPLPPRSFSRMAGDSTATSRRLGAAPDRAAPHILPAGAHRAATAPGLGGGPEPLGRALAGGLRGPQGNGWLQERKRRCPGLAGCFEAISCGTGLGLPGLALXRELISWGAPGSADSXRLLHWGSHPTAFVVSYAAALPAAALWHKLGSLWVPGGQGGSGNPVRRLLGCLGSETRRLSLFLVLVVLSSLGEMAIPFFTGRLTDWILQDGSADTFTRNLTLMSILTIASAVLEFVGDGIYNNTMGHVHSHLQGEVFGAVLRQETEFFQQNQTGNIMSRVTEDTSTLSDSLSENLSLFLWYLVRGLCLLGIMLWGSVSLTMVTLITLPLLFLLPKKVGKWYQLLEVQVRESLAKSSQVAIEALSAMPTVRSFANEEGEAXKFREKLQEIKTLNQKEAVAYAVNSWTTSISGMLLKVGILYIGGQLVTSGAVSSGNLVTFVLYQMQFTQAVEVLLSIYPRVQKAVGSSEKIFEYLDRTPRCPPSGLLTPLHLEGLVQFQDVSFAYPNRPDVLVLQGLTFTLRPGEVTALVGPNGSGKSTVAALLQNLYQPTGGQLLLDGKPLPQYEHRYLHRQVAAVGQEPQVFGRSLQENIAYGLTQKPTMEEITAAAVKSGAHSFISGLPQGYDTEVDEAGSQLSGGQRQAVALARALIRKPCVLILDDATSALDANSQLQVEQLLYESPERYXRX

SEQ ID NO: 727 - protein, 82 aa, Homo sapiens
  SITE (44): Xaa equals any of the naturally occurring L-amino acids
  SITE (73): Xaa equals any of the naturally occurring L-amino acids
TPPLVSSVAALDSHRSTNPIVNSACKGSRLCAPYENLMPDDLRXNSFILKPPFTLQSVEKLSSTKLVPGAKNXGDRCSRERS

SEQ ID NO: 728 - protein, 600 aa, Homo sapiens
  SITE (11): Xaa equals any of the naturally occurring L-amino acids
  SITE (479): Xaa equals any of the naturally occurring L-amino acids
  SITE (550): Xaa equals any of the naturally occurring L-amino acids
  SITE (588): Xaa equals any of the naturally occurring L-amino acids
  SITE (590): Xaa equals any of the naturally occurring L-amino acids
SRVKPRVRGTXVRTPGSRRGRHGAVPGDWEAAAQARGAGQRLPTPSEILSNAGLRFEVVPSKFKEKLDKASFATPYGYAMETAKQKALEVANRLYQKDLRAPDVVIGADTIVTVGGLILEKPVDKQDAYRMLSRLSGREHSVFTGVAIVHCSSKDHQLDTRVSEFYEETKVKFSELSEELLWEYVHSGEPMDKAGGYGIQALGGMLVESVHGDFLNVVGFPLNHFCKQLVKLYYPPRPEDLRRSVKHDSIPAADTFEDLSDVEGGGSEPTQRDAGSRDEKAEAGEAGQATAEAECHRTRETLPPFPTRLLELIEGFMLSKGLLTACKLKVFDLLKDEAPQKAADIASKVDASACGMERLLDICAAMGLLEKTEQGYSNTETANVYLASDGEYSLHGFIMHNNDLTWNLFTYLEFAIREGTNQHHRALGKKAEDLFQDAYYQSPETRLRFMRAMHGMTKLTACQVATAFNLSRFSSACDXGGCTGALARELAREYPRMQVTVFDLPDIIELAAHFQPPGPQQCRSTSQQVTFSGTPSPALSCTSCAGSCMXGQTTKSTSYSAGSPRAASQGPACCWWRRSWMRRRGWRXRXDAVTEHAGAD

SEQ ID NO: 729 - protein, 535 aa, Homo sapiens
GRSSFTSLVVGVFVVYVVHTCWVMYGIVYTRPCSGDANCIQPYLARRPKLQLSVYTTTRSHLGAENNIDLVLNVEDFDVESKFERTVNVSVPKKTRNNGTLYAYIFLHHAGVLPWHDGKQVHLVSPLTTYMVPKPEEINLLTGESDTQQIEAEKKPTSALDEPVSHWRPRLALNVMADNFVFDGSSLPADVHRYMKMIQLGKTVHYLPILFIDQLSNRVKDLMVINRSTTELPLTVSYDKVSLGRLRFWIHMQDAVYSLQQFGFSEKDADEVKGIFVDTNLYFLALTFFVAAFHLLFDFLAFKNDISFWKKKKSMIGMSTKAVLWRCFSTVVIFLFLLDEQTSLLVLVPAGVGAAIELWKVKKALKMTIFWRGLMPEFQFGTYSESERKTEEYDTQAMKYLSYLLYPLCVGGAVYSLLNIKYKSWYSWLINSFVNGVYAFGFLFMLPQLFVNYKLKSVAHLPWKAFTYKAFNTFIDDVFAFIITMPTSHRLACFRDDVVFLVYLYQRWLYPVDKRRVNEFGESYEEKATRAPHTD

SEQ ID NO: 730 - protein, 288 aa, Homo sapiens
RPAGVTELQPRAPGGGGMEAAAEPGNLAGVRHIILVLSGKGGVGKSTISTELALALRHAGKKVGILDVDLCGPSIPRMLGAQGRAVHQCDRGWAPVFLDREQSISLMSVGFLLEKPDEAVVWRGPKKNALIKQFVSDVAWGELDYLVVDTPPGTSDEHMATIEALRPYQPLGALVVTTPQAVSVGDVRRELTFCRKTGLRVMGIVENMSGFTCPHCTECTSVFSRGGGEELAQLAGVPFLGSVPLDPALMRTLEEGHDFIQEFPGSPAFAALTSIAQKILDATPACLP

SEQ ID NO: 731 - protein, 737 aa, Homo sapiens
DQLCGPQTYKEHLEGQKHKKKEAALKASQNTSSSNSSTRGTQNQLRCELCDVSCTGADAYAAHIRGAKHQKVVKLHTKLGKPIPSTEPNVVSQATSSTAVSASKPTASPSSIAANNCTVNTSSIATSSMKGLTTTGNSSLNSTSNTKVSAVPTNMAAKKTSTPKINFVGGNKLQSTGNKAEDTKGTECVKSTPVTSAVQIPEVKQDTVSEPVTPASLAALQSDVQPVGHDYVEEVRNDEGKVIRFHCKLCECSFNDPNAKEMHLKGRRHRLQYKKKVNPDLQVEVKPSIRARKIQEEKMRKQMQKEEYWRRREEEERWRMEMRRYEEDMYWRRMEEEQHHWDDRRRMPDGGYPHGPPGPLGLLGVRPGMPPQPQGPAPLRRPDSSDDRYVMTKHATIYPTEEELQAVQKIVSITERALKLVSDSLSEHEKNKNKEGDDKKEGGKDRALKGVLRVGVLAKGLLLRGDRNVNLVLLCSEKPSKTLLSRIAENLPKQLAVISPEKYDIKCAVSEAAIILNSCVEPKMQVTITLTSPIIREENMREGDVTSGMVKDPPDVLDRQKCLDALAALRHAKWFQARANGLQSCVIIIRILRDLCQRVPTWSDFPSWAMELLVEKAISSASSPQSPGDALRRVFECISSGIILKGSPGLLDPCEKDPFDTLATMTDQQREDITSSAQFALRLLAFRQIHKVLGMDPLPQMSQRFNIHNNRKRRRDSDGVDGFEAEGKKDKKDYDNF

SEQ ID NO: 732 - protein, 106 aa, Homo sapiens
GRGLNSPKELRPLTRAAPAAAACTGPGAAMPKCPKCNKEVYFAERVTSLGKDWHRPCLKCEKCGKTLTSGGHAEHEGKPYCNHPCYAAMFGPKGFGRGGAESHTFK

SEQ ID NO: 733 - protein, 230 aa, Homo sapiens
ASCLQSVASACASFPAPSWRGTRKRNATDRVTQCKYKRIGCPWHGPFHELTVHEAACAHPTKTGSELMEILDGMDQSHRKEMQLYNSIFSLLSFEKIGYTEVQFRPYRTDDFITRLYYETPRFTVLNQTWVLKARVNDSERNPNLSCKRTLSFQLLLKSKVTAPLECSFLLLKGPYDDVRISPVIYHFVFTNESNETDYVPLPIIDSVECNKLLAAKNINLRLFLFQIQK

SEQ ID NO: 734 - protein, 222 aa, Homo sapiens
  SITE (18): Xaa equals any of the naturally occurring L-amino acids
GRPAPPAARAGAHSRGAXAPPAAIDMMFPQSRHSGSSHLPQQLKFTTSDSCDRIKDEFQLLQAQYHSLKLECDKLASEKSEMQRHYVMYYEMSYGLNIEMHKQAEIVKRLNGICAQVLPYLSQEHQQQVLGAIERAKQVTAPELNSIIRQQLQAHQLSQLQALALPLTPLPVGLQPPSLPAVSAGTGLLSLSALGSQAHLSKEDKNGHDGDTHQEDDGEKSD

SEQ ID NO: 735 - protein, 248 aa, Homo sapiens
GTSDMELFLAGRRVLVTGAGKGIGRGTVQALHATGARVVAVSRTQADLDSLVRECPGIEPVCVDLGDWEATERALGSVGPVDLLVNNAAVALLQPFLEVTKEAFDRSFEVNLRAVIQVSQIVARGLIARGVPGAIVNVSSQCSQRAVTNHSVYCSTKGALDMLTKVMALELGPHKIRVNAVNPTVVMTSMGQATWSDPHKAKTMLNRIPLGKFAEVEHVVNAILFLLSDRSGMTTGSTLPVEGGFWAC

SEQ ID NO: 736 - protein, 216 aa, Homo sapiens
  SITE (61): Xaa equals any of the naturally occurring L-amino acids
  SITE (68): Xaa equals any of the naturally occurring L-amino acids
RLLFRVRKRMISFSAPPLMLPFSFYFFVFPVARTARKRKPSPEPEGEVGPPKINGEAQPWXSTSTEGXKIPMTPTSSFVSPPPPTASPHSNRTTPPEAAQNGQSPMAALILVADNAGGSHASKDANQVHSTTRRNSNSPPSPSSMNQRRLGPREVGGQGAGNTGGLEPVHPASLPDFSLATSAPLCCTLCHERLEDNHFVQCRPSFDKFSSLLRQR

SEQ ID NO: 737 - protein, 317 aa, Homo sapiens
RPTRPEVMMTKYSNLSLESHNFSLTASPLTSLPIPEVMMTKYSNLFLESHNISLTEHSSVPVEKNITLERPSAVELTCQFTTSGDVNSVNVTWKKGDEQLKNYHVSATEGILYTQYKFSIINSEQLGSYSCFFEEEKERRGTFNFGVPEVQRKNKPLITYVGDSVVLVCKCRHCAPLNWTWYSGNRSVQVPLDVHMNEKYAINGTNANETRLKIMQLSEDDKGSYWCHAMFQLGESQESVELVVISYLVPLKPFLGIVVEVILLVAIILFCEMHTQKKKMHMDDGKEFEQVEQLKSDDSNGIENNAPRHRKNEAMSQ

SEQ ID NO: 738 - protein, 67 aa, Homo sapiens
ARVASDPFFRHYRQLNEKLVQLIEDYSLVSFIPLNIQDKESIQRVLQAVDKANGYCFGAQEQRTWKP

SEQ ID NO: 739 - protein, 142 aa, Homo sapiens
SQQPRIMSKLGRAARGLRKPEVGGVIRAIVRAGLAMPGPPLGPVLGQRGVSINQFCKEFNERTKDIKEGIPLPTKILVKPDRTFEIKIGQPTVSYFLKAAAGIEKGARQTGKEVAGLVTLKHVYEIARIKAQDEAFACRMYP

SEQ ID NO: 740 - protein, 485 aa, Homo sapiens
  SITE (12): Xaa equals any of the naturally occurring L-amino acids
WPAVAVRFTALXLGFGDAVHVYDGPGPPESSRLLRSLTHFSNGKAVTVETLSGQAVVSYHTVAWSNGRGFNATYHVRGYCLPWDRPCGLGSGLGAGEGLGERCYSEAQRCDGSWDCADGTDEEDCPGCPPGHFPCGAAGTSGATACYLPADRCNYQTFCADGADERRCRHCQPGNFRCRDEKCVYETWVCDGQPDCADGSDEWDCSYVLPRKVITAAVIGSLVCGLLLVIALGCTCKLYAIRTQEYSIFAPLSRMEAEIVQQQAPPSYGQLIAQGAIPPVEDFPTENPNDNSVLGNLRSLLQILRQDMTPGGGPGARRRQRGRLMRRLVRRLRRWGLLPRTNTPARASEARSQVTPSAAPLEALDGGTGPAREGGAVGGQDGEQAPPLPIKAPLPSASTSPAPTTVPEAPGPLPSLPLEPSLLSGVVQALRGRLLPSLGPPGPTRSPPGPHTAVLALEDEDDVLLVPLAEPGVWVAEAEDEPLLT

SEQ ID NO: 741 - protein, 313 aa, Homo sapiens
  SITE (6): Xaa equals any of the naturally occurring L-amino acids
  SITE (7): Xaa equals any of the naturally occurring L-amino acids
  SITE (9): Xaa equals any of the naturally occurring L-amino acids
  SITE (36): Xaa equals any of the naturally occurring L-amino acids
  SITE (276): Xaa equals any of the naturally occurring L-amino acids
GGARGXXRXVASFQQQHGAQRDLKLGSRLYGPSSVXFAEDFVRSSKQHYNCEHSKINFRDKRSALQSINEWAAQTTDGKLPEVTKDVERTDGALLVNAMFFKPHWDEKFHHKMVDNRGFMVTRSYTVGVTMMHRTGLYNYYDDEKEKLQMVEMPLAHKLSSLLILMPHHVEPLERLEKLLTKEQLKIWMGKMQKKAVAISLPKGVVEVTHDLQKHLAGLGLTEAIDKNKADLSRMSGKKDLYLASVFHATAFEWDTEGNPFDQDIYGREELRSPKXFYADHPFIFLVRDTQTGSLLFIGRLVRPKGDKMRDEL

SEQ ID NO: 742 - protein, 60 aa, Homo sapiens
RNIKWEKAYKAFRILSVSSFLVFRCYVIKHIFFGFPRYTIYLFKGKSIKCIYFILWFCYL

SEQ ID NO: 743 - protein, 204 aa, Homo sapiens
  SITE (4): Xaa equals any of the naturally occurring L-amino acids
PRGXSQVCPCSWNPGVPEAKAPPRGSREDLVAEESPELLNPEPRRLSPELRLLPYMITLGDAVHNFADGLAVGAAFASSWKTGLATSLAVFCHELPHELGDFAALLHAGLSVRQALLLNLASALTAFAGLYVALAVGVSEESEAWILAVATGLFLYVALCDMLPAMLKVRDPRPWLLFLLHNVGLLGGWTVLLLLSLYEDDITF

SEQ ID NO: 744 - protein, 81 aa, Homo sapiens
  SITE (6): Xaa equals any of the naturally occurring L-amino acids
ITKGKXVACSTGPEFPGRPTRPTTEGYGCEKTTEGYGCEKTTEGYGCEKTTEGYGCEKTTEGYGCEKTTEGTAARRRQRVR

SEQ ID NO: 745 - protein, 751 aa, Homo sapiens
LPPLGSPGPARSAGSCSVLFSLILQRQDPAPALSTATMGKGVGRDKYEPAAVSEQGDKKGKKGKKDRDMDELKKEVSMDDHKLSLDELHRKYGTDLSRGLTSARAAEILARDGPNALTPPPTTPEWIKFCRQLFGGFSMLLWIGAILCFLAYSIQAATEEEPQNDNLYLGVVLSAVVIITGCFSYYQEAKSSKIMESFKNMVPQQALVIRNGEKMSINAEEVVVGDLVEVKGGDRIPADLRIISANGCKVDNSSLTGESEPQTRSPDFTNENPLETRNIAFFSTNCVEGTARGIVVYTGDRTVMGRIATLASGLEGGQTPIAAEIEHFIHIITGVAVFLGVSFFILSLILEYTWLEAVIFLIGIIVANVPEGLLATVTVCLTLTAKRMARKNCLVKNLEAVETLGSTSTICSDKTGTLTQNRMTVAHMWFDNQIHEADTTENQSGVSFDKTSATWLALSRIAGLCNRAVFQANQENLPILKRAVAGDASESALLKCIELCCGSVKEMRERYAKIVEIPFNSTNKYQLSIHKNPNTSEPQHLLVMKGAPERILDRCSSILLHGKEQPLDEELKDAFQNAYLELGGLGERVLGFCHLFLPDEQFPEGFQFDTDDVNFPIDNLCFVGLISMIDPPRAAVPDAVGKCRSAGIKVIMVTGDHPITAKAIAKGVGIISEGNETVEDIAARLNIPVSQVNPRDAKACVVHGSDLKDMTSEQLDDILKYHTEIVFAKTSPQQKLIIVERLPKTGCYRGL

SEQ ID NO: 746 - protein, 25 aa, Homo sapiens
  SITE (6): Xaa equals any of the naturally occurring L-amino acids
  SITE (8): Xaa equals any of the naturally occurring L-amino acids
IPALWXAXVGRSLEPRSLRSAWATW

SEQ ID NO: 747 - protein, 37 aa, Homo sapiens
  SITE (1): Xaa equals any of the naturally occurring L-amino acids
  SITE (2): Xaa equals any of the naturally occurring L-amino acids
XXLGGRVCSEPRWRHCTPAWGTERDSISKKKKKKIKN

SEQ ID NO: 748 - protein, 71 aa, Homo sapiens
  SITE (2): Xaa equals any of the naturally occurring L-amino acids
  SITE (42): Xaa equals any of the naturally occurring L-amino acids
  SITE (46): Xaa equals any of the naturally occurring L-amino acids
  SITE (49): Xaa equals any of the naturally occurring L-amino acids
NXALRDDVAAGRRRLHIKAVCQSVREATTASGGMNAASPRLXRHRXNGXYFTLRERLITMQKQLGGNPEVY

SEQ ID NO: 749 - protein, 109 aa, Homo sapiens
  SITE (19): Xaa equals any of the naturally occurring L-amino acids
  SITE (41): Xaa equals any of the naturally occurring L-amino acids
  SITE (43): Xaa equals any of the naturally occurring L-amino acids
  SITE (59): Xaa equals any of the naturally occurring L-amino acids
  SITE (61): Xaa equals any of the naturally occurring L-amino acids
  SITE (70): Xaa equals any of the naturally occurring L-amino acids
  SITE (75): Xaa equals any of the naturally occurring L-amino acids
  SITE (88): Xaa equals any of the naturally occurring L-amino acids
  SITE (90): Xaa equals any of the naturally occurring L-amino acids
  SITE (93): Xaa equals any of the naturally occurring L-amino acids
  SITE (102): Xaa equals any of the naturally occurring L-amino acids
  SITE (104): Xaa equals any of the naturally occurring L-amino acids
GISRKMKSSLPQGVRNVAXVCLQIGYPTVASVPHSIINGYXRXLALSVETDYTFPLAEXVXASWLIHLPXWLLPXWLLPPQLLLLLLXPXLSXNPRKSEDPXKXWIGSL

SEQ ID NO: 750 - protein, 105 aa, Homo sapiens
  SITE (3): Xaa equals any of the naturally occurring L-amino acids
  SITE (16): Xaa equals any of the naturally occurring L-amino acids
GTXGPASGVAGTMQRXSLPFAILTLVNAPYKRGFYCGDDSIRYPYRPDTITHGLMAGVTITATVILVSAGEAYLVYTDRLYSRSDFNNYVAAVYKVLGTSCLGLP

SEQ ID NO: 751 - protein, 61 aa, Homo sapiens
  SITE (1): Xaa equals any of the naturally occurring L-amino acids
  SITE (7): Xaa equals any of the naturally occurring L-amino acids
  SITE (8): Xaa equals any of the naturally occurring L-amino acids
  SITE (25): Xaa equals any of the naturally occurring L-amino acids
  SITE (45): Xaa equals any of the naturally occurring L-amino acids
  SITE (53): Xaa equals any of the naturally occurring L-amino acids
  SITE (59): Xaa equals any of the naturally occurring L-amino acids
  SITE (60): Xaa equals any of the naturally occurring L-amino acids
XSRKPRXXVTDYIKVYYTLRKQMNXNLFSSFITPTIIGLPIVIIXTMFPSIDXPITYPXXQ

SEQ ID NO: 752 - protein, 58 aa, Homo sapiens
  SITE (33): Xaa equals any of the naturally occurring L-amino acids
  SITE (48): Xaa equals any of the naturally occurring L-amino acids
SDPEAEVEESSSGLRLSLIKMTTSQKHRDFVAXPMGENQWGTWLGLVXSWARNWKKGF

SEQ ID NO: 753 - protein, 73 aa, Homo sapiens
  SITE (48): Xaa equals any of the naturally occurring L-amino acids
  SITE (51): Xaa equals any of the naturally occurring L-amino acids
  SITE (52): Xaa equals any of the naturally occurring L-amino acids
  SITE (53): Xaa equals any of the naturally occurring L-amino acids
  SITE (63): Xaa equals any of the naturally occurring L-amino acids
  SITE (71): Xaa equals any of the naturally occurring L-amino acids
TLHSKGNKSWSSTAVTAALELVGGPVPNSPYSESYYNSLAVVLQRRDXENXXXFRLVCCVELXADNNSHRXQL

SEQ ID NO: 754 - protein, 116 aa, Homo sapiens
  SITE (17): Xaa equals any of the naturally occurring L-amino acids
  SITE (43): Xaa equals any of the naturally occurring L-amino acids
  SITE (62): Xaa equals any of the naturally occurring L-amino acids
  SITE (67): Xaa equals any of the naturally occurring L-amino acids
  SITE (68): Xaa equals any of the naturally occurring L-amino acids
  SITE (81): Xaa equals any of the naturally occurring L-amino acids
  SITE (84): Xaa equals any of the naturally occurring L-amino acids
  SITE (87): Xaa equals any of the naturally occurring L-amino acids
  SITE (88): Xaa equals any of the naturally occurring L-amino acids
  SITE (91): Xaa equals any of the naturally occurring L-amino acids
  SITE (92): Xaa equals any of the naturally occurring L-amino acids
  SITE (101): Xaa equals any of the naturally occurring L-amino acids
  SITE (105): Xaa equals any of the naturally occurring L-amino acids
  SITE (107): Xaa equals any of the naturally occurring L-amino acids
  SITE (109): Xaa equals any of the naturally occurring L-amino acids
  SITE (112): Xaa equals any of the naturally occurring L-amino acids
  SITE (115): Xaa equals any of the naturally occurring L-amino acids
MGSDYIREVNVVKSARXGYSKMLLGVYAYFIEHKQRNTLIWLXTDGDARELYEKPTLSPTIXDIPSXXGAGPVVWQKSTGXNKXNHXXVSXXWGGPRNPIXPISXWXFXNSXGPXF

SEQ ID NO: 755 - protein, 148 aa, Homo sapiens
  SITE (4): Xaa equals any of the naturally occurring L-amino acids
  SITE (120): Xaa equals any of the naturally occurring L-amino acids
  SITE (135): Xaa equals any of the naturally occurring L-amino acids
  SITE (137): Xaa equals any of the naturally occurring L-amino acids
  SITE (138): Xaa equals any of the naturally occurring L-amino acids
  SITE (146): Xaa equals any of the naturally occurring L-amino acids
IRQXIDIRKDLYANNVLSGGTTMYPGIADRMQKEITALAPSTMKIKIIAPPEAQILCLDRWLHPGLSVHLPADVDQQTGNTVKPGLPLSTANAFLKHFSWFLFCLLGTQLWNVPVGIYGXFSFFFQIIPRAKVLXWXXHGVFLNKXWK

SEQ ID NO: 756 - protein, 151 aa, Homo sapiens
  SITE (147): Xaa equals any of the naturally occurring L-amino acids
AELATTSTMPYQYPALTPEQKKELSDIAHRIVAPGKGILAADESTGSIAKRLQSIGTENTEENRRFYRQLLLTADDRVNPCIGGVILFHETLYQKADDGRPFPQVIKSKGGVVGIKVDKGVVPLAGTNGETTTQGLDGLSERCAQYXEGRS

SEQ ID NO: 757 - protein, 94 aa, Homo sapiens
  SITE (21): Xaa equals any of the naturally occurring L-amino acids
  SITE (44): Xaa equals any of the naturally occurring L-amino acids
  SITE (48): Xaa equals any of the naturally occurring L-amino acids
  SITE (91): Xaa equals any of the naturally occurring L-amino acids
FVTILSIIITLFFIFQLKVSXYSFPENPEPKSLTTSKSTTPWRXQMNXNLFSSFITPTIIGLPIVIIITMFPSIIFPSPTRLINNRLISIXTMD

SEQ ID NO: 758 - protein, 115 aa, Homo sapiens
  SITE (2): Xaa equals any of the naturally occurring L-amino acids
  SITE (5): Xaa equals any of the naturally occurring L-amino acids
  SITE (11): Xaa equals any of the naturally occurring L-amino acids
  SITE (30): Xaa equals any of the naturally occurring L-amino acids
  SITE (43): Xaa equals any of the naturally occurring L-amino acids
  SITE (49): Xaa equals any of the naturally occurring L-amino acids
  SITE (51): Xaa equals any of the naturally occurring L-amino acids
  SITE (58): Xaa equals any of the naturally occurring L-amino acids
  SITE (99): Xaa equals any of the naturally occurring L-amino acids
  SITE (105): Xaa equals any of the naturally occurring L-amino acids
  SITE (115): Xaa equals any of the naturally occurring L-amino acids
RXALXRLTIGXSWYACRYRSGIPGSTHASXRRGQLRARGGGAXPRGAMXDXRAGSPRXGPAARDVAAMASPQLCRALVSAQWVAEALRAPRAGAASAAXRTPPGXLAGSWGARTX

SEQ ID NO: 759 - protein, 44 aa, Homo sapiens
  SITE (3): Xaa equals any of the naturally occurring L-amino acids
  SITE (17): Xaa equals any of the naturally occurring L-amino acids
  SITE (42): Xaa equals any of the naturally occurring L-amino acids
  SITE (43): Xaa equals any of the naturally occurring L-amino acids
IAXGRSRGSKLTWTCMXRHSSSIVSPKFNSLAVVLQRRDWEXXK

SEQ ID NO: 760 - protein, 94 aa, Homo sapiens
  SITE (80): Xaa equals any of the naturally occurring L-amino acids
  SITE (91): Xaa equals any of the naturally occurring L-amino acids
NDLVEYSPVTEKHLTDGMTVRELCSAAITMSDNTAANLLLTTIGGPKELTAFLHNMGDHVTRLDRWEPELNEAIPNDERXTTMPVAMATTXANY

SEQ ID NO: 761 - protein, 38 aa, Homo sapiens
  SITE (9): Xaa equals any of the naturally occurring L-amino acids
  SITE (21): Xaa equals any of the naturally occurring L-amino acids
  SITE (24): Xaa equals any of the naturally occurring L-amino acids
LQEINRVYXEMYKTDLEKDIXSDXSGDFRKLMVALAKG

SEQ ID NO: 762 - protein, 192 aa, Homo sapiens
  SITE (3): Xaa equals any of the naturally occurring L-amino acids
  SITE (4): Xaa equals any of the naturally occurring L-amino acids
CKXXLPSLKGTKAGAPPRCGRSRTSGSPGLQEFGTSCVGLREAVRAGAVGRGAEALARGMAHCVTLVQLSISCDHLIDKDIGSKSDPLCVLLQDVGGGSWAELGRTERVRNCSSPEFSKTLQLEYRFETVQKLRFGIYDIDNKTPELRDDDFLGGAECSLGQIVSSQVLTLPLMLKLENLLGGGPSRSQLRN

SEQ ID NO: 763 - protein, 103 aa, Homo sapiens
  SITE (96): Xaa equals any of the naturally occurring L-amino acids
SFYSIPEFDEWKKHIENQKAWKIKYYKGLGTSTAKEAKEYFADMERHRILFRYAGPEDDAAITLAFSKKKIDDRKEWLTNFMEDRRQRSYMAYQRXDSLSTQT

SEQ ID NO: 764 - protein, 105 aa, Homo sapiens
  SITE (101): Xaa equals any of the naturally occurring L-amino acids
VFSPTGSDGPLATSKPVPAEKSGLPVGPENGVELSKEELIRRKREEFIQKHGRGMEKSNKSTKSDAPKEKGKKAPRVWELGGCANKEMLDYSTSTTNGTPXACLV

SEQ ID NO: 765 - protein, 147 aa, Homo sapiens
GRETMFRAAAPGQLRRAASLLRFQSTLVIAEHANDSLAPITLNTITAATRLGGEVSCLVAGTKCDKVAQDLCKVAGIAKVLVAQHDVYKGLLPEELTPLILATQKQFNYTHICAGASAFGKNLLPRVAAKLEVAPISDIIAIKSPDT

SEQ ID NO: 766 - protein, 36 aa, Homo sapiens
  SITE (7): Xaa equals any of the naturally occurring L-amino acids
  SITE (18): Xaa equals any of the naturally occurring L-amino acids
GREAEAXQLESSKRFAKXFMDRHGIPTAQWEGFHQT

SEQ ID NO: 767 - protein, 105 aa, Homo sapiens
  SITE (62): Xaa equals any of the naturally occurring L-amino acids
  SITE (68): Xaa equals any of the naturally occurring L-amino acids
  SITE (80): Xaa equals any of the naturally occurring L-amino acids
  SITE (98): Xaa equals any of the naturally occurring L-amino acids
  SITE (100): Xaa equals any of the naturally occurring L-amino acids
  SITE (105): Xaa equals any of the naturally occurring L-amino acids
RFALSTKIPDTKGCLQCRVVRNPYTGATFLLAALPTSLLLLQWYEPLQKFLLLKNFSSPLPXPAGMLXPLVLDGKELPQXFFGAEGPKGPGCRFLFQXLXLGGWX

SEQ ID NO: 768 - protein, 154 aa, Homo sapiens
VTLTQCSEKLVQLILHEYKIFNAEVLFREDCSPDEFIDVIVGNRVYMPCLYVYNKIDQISMEEVDRLARKPNSVVISCGMKLNLDYLLEMLWEYLALTCIYTKKRGQRPDFTDAIILRKGASVEHVGTSTKYSPQRVGLTHTMEHEDVIQIVKK

SEQ ID NO: 769 - protein, 89 aa, Homo sapiens
  SITE (56): Xaa equals any of the naturally occurring L-amino acids
  SITE (84): Xaa equals any of the naturally occurring L-amino acids
NQAGLTADRMLVLSRAGQAAGLTFNQTSESLSALVKAGVSGEAQIASISQSVARFXSASGVEVDKVVEAFEGGPYPFAYSKRIXIIAVF

SEQ ID NO: 770 - protein, 85 aa, Homo sapiens
  SITE (57): Xaa equals any of the naturally occurring L-amino acids
  SITE (79): Xaa equals any of the naturally occurring L-amino acids
  SITE (83): Xaa equals any of the naturally occurring L-amino acids
  SITE (84): Xaa equals any of the naturally occurring L-amino acids
QTSRAESASMTERRVPFSLLRGPSWDPFRDWYPHSRLFDQAFGLPRLPEEWSQWLGXSSWPGYVRPLPPAASRAPQWPXPLQXXA

SEQ ID NO: 771 - protein, 76 aa, Homo sapiens
  SITE (48): Xaa equals any of the naturally occurring L-amino acids
  SITE (50): Xaa equals any of the naturally occurring L-amino acids
  SITE (70): Xaa equals any of the naturally occurring L-amino acids
DYCQVVRPSPSGETITYRQVVLSVNVKSPALLLSQLLPYMENKKGAVXLXSSIAAYNPVVALGVYNVSKXELLGSH

SEQ ID NO: 772 - protein, 105 aa, Homo sapiens
  SITE (12): Xaa equals any of the naturally occurring L-amino acids
GAEEGRQEAQGXRKESYSVYVYKVLKQVHPDTGISSKAMGIMNSFVNDIFERIAGEASRLAHYNKRSTITSREIQTAVRLLLPGELAKHAVSEGTKAVTKYTSAK

SEQ ID NO: 773 - protein, 144 aa, Homo sapiens
  SITE (98): Xaa equals any of the naturally occurring L-amino acids
  SITE (132): Xaa equals any of the naturally occurring L-amino acids
  SITE (139): Xaa equals any of the naturally occurring L-amino acids
  SITE (140): Xaa equals any of the naturally occurring L-amino acids
  SITE (141): Xaa equals any of the naturally occurring L-amino acids
FAHLPKSTFVLDEFKRKYSNEDTLSVALPYFWEHFDKDGWSLWYSEYRFPEELTQTFMSCNLITGMFQRLDKLRKNAFASVILFGTNNSSSISGVWVXPGQELAFPLSPDWQVDYEVIHMAETGSGKRGDPXAGSRVLXXXRGP

SEQ ID NO: 774 - protein, 64 aa, Homo sapiens
  SITE (7): Xaa equals any of the naturally occurring L-amino acids
  SITE (56): Xaa equals any of the naturally occurring L-amino acids
IRHEREXEQGVYTCTAQGIWKNEQKGEKIPRCLPVCGKPVNPVEQRQRIIGGQKAXGIVGAFLQ

SEQ ID NO: 775 - protein, 69 aa, Homo sapiens
NISNSQVNRLRHFVRAGLRSLFRPEPQTAVEWADANYYLPKESAYQEGRWETLPFQRAIMNANGQRLHP

SEQ ID NO: 776 - protein, 56 aa, Homo sapiens
  SITE (5): Xaa equals any of the naturally occurring L-amino acids
  SITE (15): Xaa equals any of the naturally occurring L-amino acids
  SITE (31): Xaa equals any of the naturally occurring L-amino acids
  SITE (54): Xaa equals any of the naturally occurring L-amino acids
  SITE (55): Xaa equals any of the naturally occurring L-amino acids
ERVFXPHGLIMDRTXRFARNVMKEMGGHHIXVLFLLKGGYKFFADLLDYIKGLXXK

SEQ ID NO: 777 - protein, 134 aa, Homo sapiens
  SITE (4): Xaa equals any of the naturally occurring L-amino acids
  SITE (5): Xaa equals any of the naturally occurring L-amino acids
  SITE (6): Xaa equals any of the naturally occurring L-amino acids
LQFXXXMITPSSNTTHYRESWYACRYRSGIPGSTHASGVFEVHKKNVRGEFTYYEIQDNTGKMEVVVHGRLTTINCEEGDKLKLTCFELAPKSGNTGELRSVIHSHIKVIKTRKNKKDILNPDSSMETSPDFFF

SEQ ID NO: 778 - protein, 133 aa, Homo sapiens
TITSGGNPPAFSLTPDGKLTAKNADISGSVNANSGTLSNVTIAENCTINGTLRAEKIVGDIVKAASAAFPRQVESSVDWPSGTRTVTVTDDHPFDRQIVVLPLTFRGSKRTVSGRTTYSMCYLKVLMNGAVIY

SEQ ID NO: 779 - protein, 90 aa, Homo sapiens
  SITE (52): Xaa equals any of the naturally occurring L-amino acids
  SITE (63): Xaa equals any of the naturally occurring L-amino acids
PNTALVGVQVDSEQFGSQQVSRNYHLRGRILQVPSNYNPQTRQYSGIWDGTXKPAYSNNMAWXLWDMLTHPRYGMGKRLGAADVDKWALY

SEQ ID NO: 780 - protein, 82 aa, Homo sapiens
  SITE (2): Xaa equals any of the naturally occurring L-amino acids
  SITE (14): Xaa equals any of the naturally occurring L-amino acids
  SITE (25): Xaa equals any of the naturally occurring L-amino acids
  SITE (48): Xaa equals any of the naturally occurring L-amino acids
  SITE (54): Xaa equals any of the naturally occurring L-amino acids
  SITE (62): Xaa equals any of the naturally occurring L-amino acids
  SITE (65): Xaa equals any of the naturally occurring L-amino acids
  SITE (70): Xaa equals any of the naturally occurring L-amino acids
  SITE (73): Xaa equals any of the naturally occurring L-amino acids
VXRASDDAEGYLDXFKGKITESHLXKELLEKVELTEDNASRLEEFSKXWKDASXKWNAMWAXKIXQTKDXKRXLFCYLVVRS

SEQ ID NO: 781 - protein, 49 aa, Homo sapiens
  SITE (43): Xaa equals any of the naturally occurring L-amino acids
  SITE (48): Xaa equals any of the naturally occurring L-amino acids
  SITE (49): Xaa equals any of the naturally occurring L-amino acids
PDFHREDDWWRNGQNLYLDNLEATGLYQVPLSAAQPGDVLLCXFGSSXX

SEQ ID NO: 782 - protein, 85 aa, Homo sapiens
  SITE (1): Xaa equals any of the naturally occurring L-amino acids
  SITE (31): Xaa equals any of the naturally occurring L-amino acids
XKENGTVTAANASTLNDGAAALVLMTADAAXRLNVTPLARIVAFADAAVEPIDFPIAPVYAASMVLKDVGLKKEDIAMWEVNGSL

SEQ ID NO: 783 - protein, 90 aa, Homo sapiens
  SITE (14): Xaa equals any of the naturally occurring L-amino acids
  SITE (15): Xaa equals any of the naturally occurring L-amino acids
  SITE (16): Xaa equals any of the naturally occurring L-amino acids
  SITE (27): Xaa equals any of the naturally occurring L-amino acids
  SITE (30): Xaa equals any of the naturally occurring L-amino acids
  SITE (39): Xaa equals any of the naturally occurring L-amino acids
  SITE (44): Xaa equals any of the naturally occurring L-amino acids
  SITE (63): Xaa equals any of the naturally occurring L-amino acids
  SITE (81): Xaa equals any of the naturally occurring L-amino acids
  SITE (87): Xaa equals any of the naturally occurring L-amino acids
GKSPASWWGSAGHXXXPCRGACAAAGXTAXRGFAVSARXVWQTXDRPGTWDQSRNLLLNGKSXPTKVRLIWGGSLPPVKRXADELDXRPG

SEQ ID NO: 784 - protein, 84 aa, Homo sapiens
  SITE (8): Xaa equals any of the naturally occurring L-amino acids
  SITE (64): Xaa equals any of the naturally occurring L-amino acids
  SITE (70): Xaa equals any of the naturally occurring L-amino acids
  SITE (79): Xaa equals any of the naturally occurring L-amino acids
  SITE (81): Xaa equals any of the naturally occurring L-amino acids
ALLGLTIXKAGTPAGTGPEFPGRPTRPLLCLEGIILSLFVIITITILINHLTLASITPIILLVXAACEAXLGLIPFSYXLXYIR

SEQ ID NO: 785 - protein, 61 aa, Homo sapiens
IGFDNKKDLLISVGDLVDRGAENVECLELITFPWFRAVRGNHEQMMIDGLSERGNVNHWLL

SEQ ID NO: 786 - protein, 102 aa, Homo sapiens
  SITE (8): Xaa equals any of the naturally occurring L-amino acids
  SITE (33): Xaa equals any of the naturally occurring L-amino acids
  SITE (64): Xaa equals any of the naturally occurring L-amino acids
  SITE (83): Xaa equals any of the naturally occurring L-amino acids
  SITE (84): Xaa equals any of the naturally occurring L-amino acids
  SITE (86): Xaa equals any of the naturally occurring L-amino acids
GLQPYCYXTWRCRCTTGQPGTAPAGTPGAPPLXGMAIVKEEETEAAIGAPPTATEGPETKPVLXALEEGPGAEGSRLDSLVAXXLXLEVVALRDSAPVLAGT

SEQ ID NO: 787 - protein, 64 aa, Homo sapiens
  SITE (3): Xaa equals any of the naturally occurring L-amino acids
  SITE (7): Xaa equals any of the naturally occurring L-amino acids
  SITE (44): Xaa equals any of the naturally occurring L-amino acids
  SITE (48): Xaa equals any of the naturally occurring L-amino acids
CLXRARXPAAANSSGDGGAAGDGTVVDCPVCKQQCFSKDIVENXFMRXSGSKAATDAQDANQCC

SEQ ID NO: 788 - protein, 61 aa, Homo sapiens
  SITE (52): Xaa equals any of the naturally occurring L-amino acids
TLAFFLIPCIGSPACPTMSDAAVDTSSEITTKDLKEKKEVLERGRKWKRRPXLTGNANLGK

SEQ ID NO: 789 - protein, 69 aa, Homo sapiens
  SITE (12): Xaa equals any of the naturally occurring L-amino acids
AQDNFKHLNGIXLFHCIDPNGSKHKRTDRSILCCLRKGESGQSWQGLTKERAKLNWLSVDFNNWERLGR

SEQ ID NO: 790 - protein, 51 aa, Homo sapiens
  SITE (22): Xaa equals any of the naturally occurring L-amino acids
  SITE (24): Xaa equals any of the naturally occurring L-amino acids
  SITE (35): Xaa equals any of the naturally occurring L-amino acids
  SITE (41): Xaa equals any of the naturally occurring L-amino acids
QSTVKLEHAKSVASRATVLQKXSXTPVGMFLKLNXMNVKFXSGYYELPCRS

SEQ ID NO: 791 - protein, 154 aa, Homo sapiens
  SITE (78): Xaa equals any of the naturally occurring L-amino acids
DPQAHVAMLSSTAMYSAPGRDLGMEPHRAAGPLQLRFSPYVFNGGTILAIAGEDFAIVASDTRLSEGFSIHTRDSPKXYKLTDKTVIGCSGFHGDCLTLTKIIEARLKMYKHSNNKAMTTGAIAAMLSTILYSRRFFPYYVYNIIGGLDEEGKG

SEQ ID NO: 792 - protein, 96 aa, Homo sapiens
  SITE (72): Xaa equals any of the naturally occurring L-amino acids
  SITE (73): Xaa equals any of the naturally occurring L-amino acids
  SITE (74): Xaa equals any of the naturally occurring L-amino acids
GTASTAMYSAPGRDLGMEPHRAAGPLQLRFSPYVFNGGTILAIAGEDFAIVASDTRLSEGFSIHTRDSPKCXXXNRQNSHWMQRFSWRLSYADKDY

SEQ ID NO: 793 - protein, 72 aa, Homo sapiens
  SITE (6): Xaa equals any of the naturally occurring L-amino acids
RPPVRXFLRDFFMSMYTTAQLLAANEQKFKFDPLFLRLFFRESYPFTTEESLSLTNSGTGKHGAVRFADCFR

SEQ ID NO: 794 - protein, 124 aa, Homo sapiens
GSGDHEGGKGDGMEEVPHDCPGADSAQAGRGASCQGCPNQRLCASGAGATPDTAIEEIKEKMKTVKHKILVLSGKGGVGKSTFSAHLAHGLAEDENTQIALLDIDICGPSIPKIMGLEGEQVHQ

SEQ ID NO: 795 - protein, 144 aa, Homo sapiens
  SITE (3): Xaa equals any of the naturally occurring L-amino acids
  SITE (6): Xaa equals any of the naturally occurring L-amino acids
  SITE (11): Xaa equals any of the naturally occurring L-amino acids
  SITE (16): Xaa equals any of the naturally occurring L-amino acids
  SITE (19): Xaa equals any of the naturally occurring L-amino acids
  SITE (23): Xaa equals any of the naturally occurring L-amino acids
  SITE (33): Xaa equals any of the naturally occurring L-amino acids
  SITE (39): Xaa equals any of the naturally occurring L-amino acids
  SITE (49): Xaa equals any of the naturally occurring L-amino acids
  SITE (54): Xaa equals any of the naturally occurring L-amino acids
  SITE (64): Xaa equals any of the naturally occurring L-amino acids
  SITE (71): Xaa equals any of the naturally occurring L-amino acids
  SITE (76): Xaa equals any of the naturally occurring L-amino acids
  SITE (78): Xaa equals any of the naturally occurring L-amino acids
  SITE (81): Xaa equals any of the naturally occurring L-amino acids
  SITE (83): Xaa equals any of the naturally occurring L-amino acids
  SITE (87): Xaa equals any of the naturally occurring L-amino acids
  SITE (88): Xaa equals any of the naturally occurring L-amino acids
  SITE (89): Xaa equals any of the naturally occurring L-amino acids
  SITE (93): Xaa equals any of the naturally occurring L-amino acids
  SITE (100): Xaa equals any of the naturally occurring L-amino acids
  SITE (107): Xaa equals any of the naturally occurring L-amino acids
  SITE (110): Xaa equals any of the naturally occurring L-amino acids
  SITE (112): Xaa equals any of the naturally occurring L-amino acids
  SITE (117): Xaa equals any of the naturally occurring L-amino acids
  SITE (123): Xaa equals any of the naturally occurring L-amino acids
  SITE (127): Xaa equals any of the naturally occurring L-amino acids
  SITE (136): Xaa equals any of the naturally occurring L-amino acids
ARXWLXGVTFXVTTVXTKXRTEXVQKLCPGGQXPFLLYXTEVHTDTNKXAEFLXAVLCPPRYPXLAALNPXSNTAXLXIFXKXSAYXXXSNPXLNDNLEXGLLKALXVLXNXLTSPXSEEVDXTSAXVKVSLRRSXWIARAHPG

SEQ ID NO: 796 - protein, 97 aa, Homo sapiens
  SITE (31): Xaa equals any of the naturally occurring L-amino acids
IMKNGFYATYRSKNKGKDKRSINLSVFLNSXLADNHHLQVGSNYLYIHKIDGKTFLFTKTNDKSLVQKINRSKASVEDIKNSLVDDGIIGIPIFFVC

SEQ ID NO: 797 - protein, 181 aa, Homo sapiens
  SITE (2): Xaa equals any of the naturally occurring L-amino acids
  SITE (3): Xaa equals any of the naturally occurring L-amino acids
RXXPSLKGTKAGAPPRCGRSRTSGSPGLQEFGTRPSRLRKTRKLRGHVSHGHGRIGKHRKHPGGRGNAGGLHHHRINFDKYHPGYFGKVGMKHYHLKRNQSFCPTVNLDKLWTLVSEQTRVNAAKNKTGAAPIIDVVRSGYYKVLGKGKLPKQPVIVKAKFFSRRAEEKIKSVGGACVLVA

SEQ ID NO: 798 - protein, 136 aa, Homo sapiens
  SITE (29): Xaa equals any of the naturally occurring L-amino acids
WIPRAAGIRHERKEGWREEKGPFCHQRRXTREYTINIHKRIHGVGFKKRAPRALKEIRKFAMKEMGTPDVRIDTRLNKAVWAKGIRNVPYRIRVRLSRKRNEDEDSPNKLYTLVTYVPVTTFKISVLNSVTVAKSP

SEQ ID NO: 799 - protein, 142 aa, Homo sapiens
WIPRAAGIRHEAALAACAAMAKIKARDLRGKKKEELLKQLDDLKVELSQLRVAKVTGGAASKLSKIRVVRKSIARVLTVINQTQKENLRKFYKGKKYKPLDLRPKKTRAMRRRLNKHEENLKTKKQQRKERLYPLRKYAVKA

SEQ ID NO: 800 - protein, 74 aa, Homo sapiens
  SITE (1): Xaa equals any of the naturally occurring L-amino acids
  SITE (2): Xaa equals any of the naturally occurring L-amino acids
  SITE (14): Xaa equals any of the naturally occurring L-amino acids
  SITE (15): Xaa equals any of the naturally occurring L-amino acids
  SITE (20): Xaa equals any of the naturally occurring L-amino acids
  SITE (58): Xaa equals any of the naturally occurring L-amino acids
  SITE (59): Xaa equals any of the naturally occurring L-amino acids
  SITE (60): Xaa equals any of the naturally occurring L-amino acids
  SITE (62): Xaa equals any of the naturally occurring L-amino acids
  SITE (64): Xaa equals any of the naturally occurring L-amino acids
  SITE (68): Xaa equals any of the naturally occurring L-amino acids
XXYHKYKAKRNCWXXVRGVXMNPVEHPFGGGNHQHIGKPSTIRRDAPAGRKVGLIAAXXXGXLXGTKXVQEKEN

SEQ ID NO: 801 - protein, 100 aa, Homo sapiens
  SITE (12): Xaa equals any of the naturally occurring L-amino acids
  SITE (49): Xaa equals any of the naturally occurring L-amino acids
MTPVQRGGPGAXVALGWGTAVASARFRQWHPGPGSRPWTGPGPRPRTRXGKAEDKEWMPVTKLGRLVKDMKIKSLEEIYLFSLPIKESEIIDSSWGLSQG

SEQ ID NO: 802 - protein, 19 aa, Homo sapiens
  SITE (1): Xaa equals any of the naturally occurring L-amino acids
XETQAIVCQQLDLTHLKGA

SEQ ID NO: 803 - protein, 54 aa, Homo sapiens
  SITE (51): Xaa equals any of the naturally occurring L-amino acids
GTRDVRRVPGVAPTLVRSASETSEKRPFMCAYPGCNKRYFKLSHLQMHSRXAHW

SEQ ID NO: 804 - protein, 140 aa, Homo sapiens
  SITE (98): Xaa equals any of the naturally occurring L-amino acids
  SITE (104): Xaa equals any of the naturally occurring L-amino acids
  SITE (120): Xaa equals any of the naturally occurring L-amino acids
  SITE (135): Xaa equals any of the naturally occurring L-amino acids
  SITE (136): Xaa equals any of the naturally occurring L-amino acids
FKSYLGDTIEGSLQVTGPEIPGSTHASAESLSRRKLDTGTGSAMRLLPRLLLLLLLVFPATVLFRGGPRGLLAVAQDLTEDEETVEDSIIEDEDDEAXVEEDEXTDFVEDKEEEDVSGEXETLPSADTTILFLKXXIFRQ

SEQ ID NO: 805 - protein, 130 aa, Homo sapiens
  SITE (105): Xaa equals any of the naturally occurring L-amino acids
  SITE (119): Xaa equals any of the naturally occurring L-amino acids
  SITE (120): Xaa equals any of the naturally occurring L-amino acids
  SITE (124): Xaa equals any of the naturally occurring L-amino acids
  SITE (125): Xaa equals any of the naturally occurring L-amino acids
FEANRQRATMAVARAALGPLVTGLYDVQAFKFGDFVLKSGLSSPIYIDLRGIVSRPRLLSQVADILFQTAQNAGISFDTVCGVPYTALPLATVICSTNQIPMLIXRKETKDYGTKRLVXXILIXXKLFNH

SEQ ID NO: 806 - protein, 35 aa, Homo sapiens
VADIAWWFRRRIFIAVLRCNSSISDAESMMSAIFH

SEQ ID NO: 807 - protein, 72 aa, Homo sapiens
  SITE (7): Xaa equals any of the naturally occurring L-amino acids
  SITE (18): Xaa equals any of the naturally occurring L-amino acids
  SITE (21): Xaa equals any of the naturally occurring L-amino acids
  SITE (38): Xaa equals any of the naturally occurring L-amino acids
  SITE (42): Xaa equals any of the naturally occurring L-amino acids
  SITE (54): Xaa equals any of the naturally occurring L-amino acids
  SITE (61): Xaa equals any of the naturally occurring L-amino acids
  SITE (65): Xaa equals any of the naturally occurring L-amino acids
  SITE (67): Xaa equals any of the naturally occurring L-amino acids
  SITE (68): Xaa equals any of the naturally occurring L-amino acids
DWRQTSXSGAHGRLKPWXNPXARRDAREDRATWKSNYXLKIXQRIGMIILKWVXLVGSEYXMVGXPXXSMAS

SEQ ID NO: 808 - protein, 53 aa, Homo sapiens
  SITE (30): Xaa equals any of the naturally occurring L-amino acids
  SITE (52): Xaa equals any of the naturally occurring L-amino acids
PSLKGTKAGNDLVSLRAARTLRPPGTKPGXGATFGPGLSERASAQRGSGQLXH

SEQ ID NO: 809 - protein, 70 aa, Homo sapiens
  SITE (2): Xaa equals any of the naturally occurring L-amino acids
  SITE (16): Xaa equals any of the naturally occurring L-amino acids
  SITE (23): Xaa equals any of the naturally occurring L-amino acids
  SITE (35): Xaa equals any of the naturally occurring L-amino acids
  SITE (39): Xaa equals any of the naturally occurring L-amino acids
  SITE (46): Xaa equals any of the naturally occurring L-amino acids
  SITE (49): Xaa equals any of the naturally occurring L-amino acids
  SITE (53): Xaa equals any of the naturally occurring L-amino acids
AXEYTLRTSGLTVRPXTSGPGCXCQGGLSDLRMGXMEWXRRDAGVXAGXDRSXTHECQVQVVRVGDMSLE

SEQ ID NO: 810 - protein, 39 aa, Homo sapiens
  SITE (1): Xaa equals any of the naturally occurring L-amino acids
  SITE (3): Xaa equals any of the naturally occurring L-amino acids
  SITE (4): Xaa equals any of the naturally occurring L-amino acids
  SITE (18): Xaa equals any of the naturally occurring L-amino acids
  SITE (22): Xaa equals any of the naturally occurring L-amino acids
  SITE (39): Xaa equals any of the naturally occurring L-amino acids
XIXXCGFEPPHFLTLNLXMHRXSCPLDCKVYVGILGTMX

SEQ ID NO: 811 - protein, 27 aa, Homo sapiens
  SITE (22): Xaa equals any of the naturally occurring L-amino acids
  SITE (24): Xaa equals any of the naturally occurring L-amino acids
  SITE (25): Xaa equals any of the naturally occurring L-amino acids
GREKKKKKKKKKKKKKKKKKKXPXXGP

SEQ ID NO: 812 - protein, 72 aa, Homo sapiens
  SITE (4): Xaa equals any of the naturally occurring L-amino acids
  SITE (21): Xaa equals any of the naturally occurring L-amino acids
RRRXRPAPPPGACLHLRLPKXLGQRLDARHQGPVEVLQEERRPRPRLPRPALATLSARFTNKLSDPKKKKKK

SEQ ID NO: 813 - protein, 27 aa, Homo sapiens
  SITE (4): Xaa equals any of the naturally occurring L-amino acids
  SITE (5): Xaa equals any of the naturally occurring L-amino acids
NSAXXKKKKKKKKKKKKKKKKKKKKKK

SEQ ID NO: 814 - protein, 23 aa, Homo sapiens
  SITE (23): Xaa equals any of the naturally occurring L-amino acids
NSAQKKKKKKKKKKKKKKKKKKX

SEQ ID NO: 815 - protein, 46 aa, Homo sapiens
  SITE (16): Xaa equals any of the naturally occurring L-amino acids
  SITE (19): Xaa equals any of the naturally occurring L-amino acids
  SITE (24): Xaa equals any of the naturally occurring L-amino acids
  SITE (31): Xaa equals any of the naturally occurring L-amino acids
  SITE (37): Xaa equals any of the naturally occurring L-amino acids
  SITE (38): Xaa equals any of the naturally occurring L-amino acids
  SITE (46): Xaa equals any of the naturally occurring L-amino acids
FDQRTRITRPQRRVFXASXSPPKXITNCIYXKINRYXXLNIAIQIX

SEQ ID NO: 816 - protein, 52 aa, Homo sapiens
  SITE (4): Xaa equals any of the naturally occurring L-amino acids
  SITE (22): Xaa equals any of the naturally occurring L-amino acids
  SITE (41): Xaa equals any of the naturally occurring L-amino acids
  SITE (45): Xaa equals any of the naturally occurring L-amino acids
  SITE (50): Xaa equals any of the naturally occurring L-amino acids
NSAXLKQTGLKGVTFNKRMKMXKKKKKKKKKKKKKKKKKKXPGGXPPPPXPP

SEQ ID NO: 817 - protein, 113 aa, Homo sapiens
  SITE (1): Xaa equals any of the naturally occurring L-amino acids
  SITE (28): Xaa equals any of the naturally occurring L-amino acids
  SITE (68): Xaa equals any of the naturally occurring L-amino acids
  SITE (69): Xaa equals any of the naturally occurring L-amino acids
  SITE (100): Xaa equals any of the naturally occurring L-amino acids
  SITE (110): Xaa equals any of the naturally occurring L-amino acids
XSGRGGSHSRNLVLFFPQLGKRHMSLAXPIANPVVGFLAYSRPSVLPGWHRPHRTSRVGLSGSSTAGXXNSRFGGCSFQAGDTLGPVVRSPVLRHLVWNXRLAVSIGVGXCAA

SEQ ID NO: 818 - protein, 132 aa, Homo sapiens
  SITE (5): Xaa equals any of the naturally occurring L-amino acids
  SITE (9): Xaa equals any of the naturally occurring L-amino acids
  SITE (11): Xaa equals any of the naturally occurring L-amino acids
  SITE (15): Xaa equals any of the naturally occurring L-amino acids
  SITE (23): Xaa equals any of the naturally occurring L-amino acids
  SITE (27): Xaa equals any of the naturally occurring L-amino acids
  SITE (38): Xaa equals any of the naturally occurring L-amino acids
  SITE (39): Xaa equals any of the naturally occurring L-amino acids
  SITE (56): Xaa equals any of the naturally occurring L-amino acids
  SITE (57): Xaa equals any of the naturally occurring L-amino acids
  SITE (71): Xaa equals any of the naturally occurring L-amino acids
  SITE (72): Xaa equals any of the naturally occurring L-amino acids
  SITE (77): Xaa equals any of the naturally occurring L-amino acids
  SITE (79): Xaa equals any of the naturally occurring L-amino acids
  SITE (81): Xaa equals any of the naturally occurring L-amino acids
  SITE (82): Xaa equals any of the naturally occurring L-amino acids
  SITE (85): Xaa equals any of the naturally occurring L-amino acids
  SITE (87): Xaa equals any of the naturally occurring L-amino acids
  SITE (93): Xaa equals any of the naturally occurring L-amino acids
  SITE (94): Xaa equals any of the naturally occurring L-amino acids
  SITE (97): Xaa equals any of the naturally occurring L-amino acids
  SITE (105): Xaa equals any of the naturally occurring L-amino acids
  SITE (108): Xaa equals any of the naturally occurring L-amino acids
  SITE (116): Xaa equals any of the naturally occurring L-amino acids
  SITE (121): Xaa equals any of the naturally occurring L-amino acids
  SITE (127): Xaa equals any of the naturally occurring L-amino acids
FFFFXKGTXTXLPFXPNQNQNPXQSIXKSKPGQNQNEXXKQSKSSQKQKPKCRYRXXVGDQATLPLKWSGXXPKTSXTXFXXSGXQXPVPSQXXAAXLILCGGLXNAXLARCSTGXIAYPXVLSGSXSLKLA

SEQ ID NO: 819 - protein, 62 aa, Homo sapiens
  SITE (4): Xaa equals any of the naturally occurring L-amino acids
  SITE (54): Xaa equals any of the naturally occurring L-amino acids
  SITE (55): Xaa equals any of the naturally occurring L-amino acids
NSAXQTTPSLSYVFLLQTTRQLLKPAIHVYFNKLMAKKKKKKKKKKKKKKKKKXXGGGPPPP

SEQ ID NO: 820 - protein, 40 aa, Homo sapiens
  SITE (7): Xaa equals any of the naturally occurring L-amino acids
  SITE (17): Xaa equals any of the naturally occurring L-amino acids
  SITE (26): Xaa equals any of the naturally occurring L-amino acids
  SITE (27): Xaa equals any of the naturally occurring L-amino acids
  SITE (38): Xaa equals any of the naturally occurring L-amino acids
DHTSDTXAWVTERDSVXGKEKKKKKXXGGAPVPNWPYXGS

SEQ ID NO: 821 - protein, 64 aa, Homo sapiens
  SITE (2): Xaa equals any of the naturally occurring L-amino acids
AXPTQQSFPQLPRRKGPSWVWDHKGGDCTPLPLGPGCGQRPPCVSRVTVPLSCDAISVCAWSPQ

SEQ ID NO: 822 - protein, 61 aa, Homo sapiens
  SITE (23): Xaa equals any of the naturally occurring L-amino acids
HLCFKWGSPCRGFIGHWLSKCQXWAGGGTEPPQHCALVEKALTCHAPLKPPLLTCLLHPSH

SEQ ID NO: 823 - protein, 73 aa, Homo sapiens
  SITE (49): Xaa equals any of the naturally occurring L-amino acids
  SITE (57): Xaa equals any of the naturally occurring L-amino acids
  SITE (72): Xaa equals any of the naturally occurring L-amino acids
TAGRWPWKSESAKECVTTHLPNQLALKMDGAGASGPYPSVAGSREWTGXAGAARARXVMVCVGGRRRRRGCXV

SEQ ID NO: 824 - protein, 34 aa, Homo sapiens
  SITE (3): Xaa equals any of the naturally occurring L-amino acids
  SITE (12): Xaa equals any of the naturally occurring L-amino acids
  SITE (27): Xaa equals any of the naturally occurring L-amino acids
  SITE (31): Xaa equals any of the naturally occurring L-amino acids
PRXRRQQQPHHXVADGPHAGGPLPALXRRLXLPL

SEQ ID NO: 825 - protein, 21 aa, Homo sapiens
  SITE (6): Xaa equals any of the naturally occurring L-amino acids
  SITE (7): Xaa equals any of the naturally occurring L-amino acids
  SITE (19): Xaa equals any of the naturally occurring L-amino acids
PYSESXXNSLAVVLQRRDXEN

SEQ ID NO: 826 - protein, 56 aa, Homo sapiens
  SITE (48): Xaa equals any of the naturally occurring L-amino acids
  SITE (56): Xaa equals any of the naturally occurring L-amino acids
MSEACIVIISYFFPLDPSHQMFVDFIRIFKLPASGFVELGISVSLIFXLLSCTYFX

SEQ ID NO: 827 - protein, 54 aa, Homo sapiens
  SITE (4): Xaa equals any of the naturally occurring L-amino acids
  SITE (41): Xaa equals any of the naturally occurring L-amino acids
  SITE (47): Xaa equals any of the naturally occurring L-amino acids
NSKXITIKKAGTPAGTGPEFPGRPTRPTAARRRQKGTAARXRQKGAXERRRQKG

SEQ ID NO: 828 - protein, 78 aa, Homo sapiens
  SITE (43): Xaa equals any of the naturally occurring L-amino acids
  SITE (56): Xaa equals any of the naturally occurring L-amino acids
LVFTETLREHKFMGFLMMILLGIMSYSLSSLMNVKLHCSQRFXLLSTAINHGHSPXNIIFFLLKEKNGKKLQGNGNYY

SEQ ID NO: 829 - protein, 89 aa, Homo sapiens
SAEEKKLTRIPSVTASEQGRAQRRIPAPRRGAGHVAYGRPAPRRRSWGAQVLLIEAQPVDGVRPVAAPGAPGPGLPGVGLLGNAAQSGW

SEQ ID NO: 830 - protein, 43 aa, Homo sapiens
  SITE (43): Xaa equals any of the naturally occurring L-amino acids
PLIFINSRIHTDSPGIVPSHSEDALRTLQILLPYITLNSGLRX

SEQ ID NO: 831 - protein, 110 aa, Homo sapiens
  SITE (34): Xaa equals any of the naturally occurring L-amino acids
  SITE (66): Xaa equals any of the naturally occurring L-amino acids
  SITE (87): Xaa equals any of the naturally occurring L-amino acids
  SITE (89): Xaa equals any of the naturally occurring L-amino acids
  SITE (98): Xaa equals any of the naturally occurring L-amino acids
  SITE (99): Xaa equals any of the naturally occurring L-amino acids
  SITE (103): Xaa equals any of the naturally occurring L-amino acids
KDSLDSGKLLGSQLQFITVKGQRLRSAKGGGAQXRSTTDEATASICPLPVEPYRQHLILTATCDNXQEVLPILPTRAASLGDLCVPXFXVCLGDRVWXXLGRXRVHGGDS

SEQ ID NO: 832 - protein, 50 aa, Homo sapiens
  SITE (20): Xaa equals any of the naturally occurring L-amino acids
QRSILVTWFHCHHLVDVQFXTILSAPSGSLAHSLLCNCWRITAEFLAVLS

SEQ ID NO: 833 - protein, 47 aa, Homo sapiens
  SITE (10): Xaa equals any of the naturally occurring L-amino acids
  SITE (13): Xaa equals any of the naturally occurring L-amino acids
  SITE (17): Xaa equals any of the naturally occurring L-amino acids
  SITE (32): Xaa equals any of the naturally occurring L-amino acids
  SITE (34): Xaa equals any of the naturally occurring L-amino acids
  SITE (38): Xaa equals any of the naturally occurring L-amino acids
  SITE (40): Xaa equals any of the naturally occurring L-amino acids
HLKLLGLERXQRXSGRXTTLGGRSTGLVIELXLXRLLXCXMNCNICL

SEQ ID NO: 834 - protein, 90 aa, Homo sapiens
  SITE (2): Xaa equals any of the naturally occurring L-amino acids
  SITE (3): Xaa equals any of the naturally occurring L-amino acids
  SITE (21): Xaa equals any of the naturally occurring L-amino acids
EXXTEGYGCERRQKGTAARRXQKGTAARRRQKGTAARRRQKGTAARRRQKVRLREDDRRIRLREDDRRENLSSTLNLPTEPSKSPCKFNC

SEQ ID NO: 835 - protein, 51 aa, Homo sapiens
  SITE (3): Xaa equals any of the naturally occurring L-amino acids
  SITE (28): Xaa equals any of the naturally occurring L-amino acids
  SITE (41): Xaa equals any of the naturally occurring L-amino acids
  SITE (48): Xaa equals any of the naturally occurring L-amino acids
  SITE (51): Xaa equals any of the naturally occurring L-amino acids
DIXLVFILKQFLGLFRGSLCCLYCIDLXYRCLFIKKKIQKXKKKINKXKKX

SEQ ID NO: 836 - protein, 47 aa, Homo sapiens
  SITE (46): Xaa equals any of the naturally occurring L-amino acids
  SITE (47): Xaa equals any of the naturally occurring L-amino acids
SSLQKNLVLEYFLKGILNTIKTAFFFPASIQPTWFCFNKSLEKLIXX

SEQ ID NO: 837 - DNA, 733 bp, Homo sapiens
gggatccggagcccaaatcttctgacaaaactcacacatgcccaccgtgcccagcacctgaattcgagggtgcaccgtcagtcttcctcttccccccaaaacccaaggacaccctcatgatctcccggactcctgaggtcacatgcgtggtggtggacgtaagccacgaagaccctgaggtcaagttcaactggtacgtggacggcgtggaggtgcataatgccaagacaaagccgcgggaggagcagtacaacagcacgtaccgtgtggtcagcgtcctcaccgtcctgcaccaggactggctgaatggcaaggagtacaagtgcaaggtctccaacaaagccctcccaacccccatcgagaaaaccatctccaaagccaaagggcagccccgagaaccacaggtgtacaccctgcccccatcccgggatgagctgaccaagaaccaggtcagcctgacctgcctggtcaaaggcttctatccaagcgacatcgccgtggagtgggagagcaatgggcagccggagaacaactacaagaccacgcctcccgtgctggactccgacggctccttcttcctctacagcaagctcaccgtggacaagagcaggtggcagcaggggaacgtcttctcatgctccgtgatgcatgaggctctgcacaaccactacacgcagaagagcctctccctgtctccgggtaaatgagtgcgacggccgcgactctagaggat

SEQ ID NO: 838 - protein, 5 aa, Homo sapiens
  SITE (3): Xaa equals any of the naturally occurring L-amino acids
WSXWS

SEQ ID NO: 839 - DNA, 86 bp, Homo sapiens
gcgcctcgagatttccccgaaatctagatttccccgaaatgatttccccgaaatgatttccccgaaatatctgccatctcaattag

SEQ ID NO: 840 - DNA, 27 bp, Homo sapiens
gcggcaagctttttgcaaagcctaggc

SEQ ID NO: 841 - DNA, 271 bp, Homo sapiens
ctcgagatttccccgaaatctagatttccccgaaatgatttccccgaaatgatttccccgaaatatctgccatctcaattagtcagcaaccatagtcccgcccctaactccgcccatcccgcccctaactccgcccagttccgcccattctccgccccatggctgactaattttttttatttatgcagaggccgaggccgcctcggcctctgagctattccagaagtagtgaggaggcttttttggaggcctaggcttttgcaaaaagctt

SEQ ID NO: 842 - DNA, 32 bp, Homo sapiens
gcgctcgagggatgacagcgatagaaccccgg

SEQ ID NO: 843 - DNA, 31 bp, Homo sapiens
gcgaagcttcgcgactccccggatccgcctc

SEQ ID NO: 844 - DNA, 12 bp, Homo sapiens
ggggactttccc

SEQ ID NO: 845 - DNA, 73 bp, Homo sapiens
gcggcctcgaggggactttcccggggactttccggggactttccgggactttccatcctgccatctcaattag

SEQ ID NO: 846 - DNA, 256 bp, Homo sapiens
ctcgaggggactttcccggggactttccggggactttccgggactttccatctgccatctcaattagtcagcaaccatagtcccgcccctaactccgcccatcccgcccctaactccgcccagttccgcccattctccgccccatggctgactaattttttttatttatgcagaggccgaggccgcctcggcctctgagctattccagaagtagtgaggaggcttttttggaggcctaggcttttgcaaaaagctt

What is claimed is:

1. An isolated nucleic acid molecule comprising a polynucleotide having a nucleotide sequence at least 95% identical to a sequence selected from the group consisting of:
(a) a polynucleotide fragment of SEQ ID NO:X or a polynucleotide fragment of the cDNA sequence included in the related cDNA clone, which is hybridizable to SEQ ID NO:X;
(b) a polynucleotide encoding a polypeptide fragment of SEQ ID NO:Y or a polypeptide fragment encoded by the cDNA sequence included in the related cDNA clone, which is hybridizable to SEQ ID NO:X;
(c) a polynucleotide encoding a polypeptide fragment of a polypeptide encoded by SEQ ID NO:X or a polypeptide fragment encoded by the cDNA sequence included in the related cDNA clone, which is hybridizable to SEQ ID NO:X;
(d) a polynucleotide encoding a polypeptide domain of SEQ ID NO:Y or a polypeptide domain encoded by the cDNA sequence included in the related cDNA clone, which is hybridizable to SEQ ID NO:X;
(e) a polynucleotide encoding a polypeptide epitope of SEQ ID NO:Y or a polypeptide epitope encoded by the cDNA sequence included in the related cDNA clone, which is hybridizable to SEQ ID NO:X;
(f) a polynucleotide encoding a polypeptide of SEQ ID NO:Y or the cDNA sequence included in the related cDNA clone, which is hybridizable to SEQ ID NO:X, having biological activity;
(g) a polynucleotide which is a variant of SEQ ID NO:X;
(h) a polynucleotide which is an allelic variant of SEQ ID NO:X;
(i) a polynucleotide which encodes a species homologue of the SEQ ID NO:Y;
(j) a polynucleotide capable of hybridizing under stringent conditions to any one of the polynucleotides specified in (a)-(i), wherein said polynucleotide does not hybridize under stringent conditions to a nucleic acid molecule having a nucleotide sequence of only A residues or of only T residues.

2. The isolated nucleic acid molecule of claim 1, wherein the polynucleotide fragment comprises a nucleotide sequence encoding a protein.

3. The isolated nucleic acid molecule of claim 1, wherein the polynucleotide fragment comprises a nucleotide sequence encoding the sequence identified as SEQ ID NO:Y or the polypeptide encoded by the cDNA sequence included in the related cDNA clone, which is hybridizable to SEQ ID NO:X.

4. The isolated nucleic acid molecule of claim 1, wherein the polynucleotide fragment comprises the entire nucleotide sequence of SEQ ID NO:X or the cDNA sequence included in the related cDNA clone, which is hybridizable to SEQ ID NO:X.

5. The isolated nucleic acid molecule of claim 2, wherein the nucleotide sequence comprises sequential nucleotide deletions from either the C-terminus or the N-terminus.

6. The isolated nucleic acid molecule of claim 3, wherein the nucleotide sequence comprises sequential nucleotide deletions from either the C-terminus or the N-terminus.

7. A recombinant vector comprising the isolated nucleic acid molecule of claim 1.

8. A method of making a recombinant host cell comprising the isolated nucleic acid molecule of claim 1.

9. A recombinant host cell produced by the method of claim 8.

10. The recombinant host cell of claim 9 comprising vector sequences.

11. An isolated polypeptide comprising an amino acid sequence at least 95% identical to a sequence selected from the group consisting of:
(a) a polypeptide fragment of SEQ ID NO:Y or of the sequence encoded by the cDNA included in the related cDNA clone;
(b) a polypeptide fragment of SEQ ID NO:Y or of the sequence encoded by the cDNA included in the related cDNA clone, having biological activity;
(c) a polypeptide domain of SEQ ID NO:Y or of the sequence encoded by the cDNA included in the related cDNA clone;
(d) a polypeptide epitope of SEQ ID NO:Y or of the sequence encoded by the cDNA included in the related cDNA clone;
(e) a full length protein of SEQ ID NO:Y or of the sequence encoded by the cDNA included in the related cDNA clone;
(f) a variant of SEQ ID NO:Y;
(g) an allelic variant of SEQ ID NO:Y; or
(h) a species homologue of the SEQ ID NO:Y.

12. The isolated polypeptide of claim 11, wherein the full length protein comprises sequential amino acid deletions from either the C-terminus or the N-terminus.

13. An isolated antibody that binds specifically to the isolated polypeptide of claim 11.

14. A recombinant host cell that expresses the isolated polypeptide of claim 11.

15. A method of making an isolated polypeptide comprising:
(a) culturing the recombinant host cell of claim 14 under conditions such that said polypeptide is expressed; and
(b) recovering said polypeptide.

16. The polypeptide produced by claim 15.

17. A method for preventing, treating, or ameliorating a medical condition, comprising administering to a mammalian subject a therapeutically effective amount of the polypeptide of claim 11 or the polynucleotide of claim 1.

18. A method of diagnosing a pathological condition or a susceptibility to a pathological condition in a subject comprising:
(a) determining the presence or absence of a mutation in the polynucleotide of claim 1; and
(b) diagnosing a pathological condition or a susceptibility to a pathological condition based on the presence or absence of said mutation.

19. A method of diagnosing a pathological condition or a susceptibility to a pathological condition in a subject comprising:
(a) determining the presence or amount of expression of the polypeptide of claim 11 in a biological sample; and
(b) diagnosing a pathological condition or a susceptibility to a pathological condition based on the presence or amount of expression of the polypeptide.

20. A method for identifying a binding partner to the polypeptide of claim 11 comprising:
(a) contacting the polypeptide of claim 11 with a binding partner; and
(b) determining whether the binding partner effects an activity of the polypeptide.

21. The gene corresponding to the cDNA sequence of SEQ ID NO:Y.

22. A method of identifying an activity in a biological assay, wherein the method comprises:
(a) expressing SEQ ID NO:X in a cell;
(b) isolating the supernatant;
(c) detecting an activity in a biological assay; and
(d) identifying the protein in the supernatant having the activity.

23. The product produced by the method of claim 20.
